(19) United States
(12) Patent Application Publication
(10) Pub. No.: US 2025/0064974 A1
(43) Pub. Date: Feb. 27, 2025

(54) ENDOGENOUS GENE REGULATION TO TREAT NEUROLOGICAL DISORDERS AND DISEASES

(71) Applicants: UCL BUSINESS LTD, London (GB); Ospedale San Raffaele S.r.l, Milano (IT)

(72) Inventors: Gabriele LIGNANI, London (GB); Dimitri KULLMANN, London (GB); Stephanie SCHORGE, London (GB); Yichen QIU, London (GB); Francisco MOREIRA, London (GB); Gaia COLASANTE, Milano (IT); Vania BROCCOLI, Milano (IT)

(21) Appl. No.: 18/726,752

(22) PCT Filed: Jan. 6, 2023
(86) PCT No.: PCT/EP2023/050241

§ 371 Date: Jul. 3, 2024

(30) Foreign Application Priority Data
Jan. 6, 2022 (GB) 2200119.2

(51) Int. Cl. A61K 48/00; A61K 38/17; A61P 25/08; C12N 9/22; C12N 15/11; C12N 15/86

(52) U.S. Cl. CPC A61K 48/005; A61K 38/1709; A61P 25/08; C12N 9/22; C12N 15/111; C12N 15/86; C07K 2319/71; C12N 2310/20; C12N 2750/14143; C12N 2750/14151

(57) ABSTRACT

The invention provides targeting RNA, single guide RNA, tracrRNA, crisprRNA and expression vectors for use in CRISPR activation (CRISPRa) methods for the treatment of neurological disorders and diseases, in particular epilepsy and pain. In some preferred embodiments, a combinatorial gene therapy approach is used, wherein expression of multiple endogenous human genes are increased in a subject, in order to achieve a greater rescue of seizures and/or behavioural deficits, and restore physiological brain function.

### TECHNICAL FIELD

[0001] The present invention relates generally to methods and materials involving regulation of endogenous gene regulation to treat neurological disorders and diseases. In some particular cases, the invention relates to CRISPRa-mediated gene therapy for neurological disorders, such as epilepsy.

### BACKGROUND ART

[0002] Epilepsy remains one of the most common serious neurological diseases, affecting 1% of the world's population. Of these sufferers, 30% are refractory to pharmacological treatment. New anti-epileptic drugs have had little impact on refractory epilepsy and people with uncontrolled seizures continue to experience co-morbidities, social exclusion, and a substantial risk of sudden unexpected death in epilepsy (SUDEP). Refractory epilepsy is mostly focal but primary generalized epilepsy can also be resistant to pharmacotherapy.

[0003] Although surgical resection of the epileptogenic zone can result in seizure freedom, it is unsuitable for 90% of people with refractory epilepsy. Furthermore, surgery is limited by risk of damage to eloquent regions of the cortex involved in functions such as memory, language, vision or motor control. However, such surgery is unsuitable for many due to risk of damage to eloquent regions of the cortex involved in functions such as memory, language, vision or motor control.

[0004] Minimally invasive ablation procedures using lasers have a role in targeting inaccessible deep structures in the brain but are also limited by risk of damage to neighbouring structures. Deep brain stimulation and other neuromodulatory treatments are of limited effectiveness.

[0005] Gene therapy is a promising candidate as a rational replacement for surgical treatment of pharmaco-resistant focal epilepsy. However, current experimental gene therapies are based on either the permanent modification of neuronal excitability using exogenous gene delivery (neurotransmitter, ion channel or receptor overexpression) or the exogenous delivery of light or chemicals to achieve on-demand modulation of neuronal activity (optogenetics and chemogenetics). These approaches have several limitations. In particular they are limited by the size of the promoter and transgene that can fit into a viral vector (AAV or lentivector) meaning that only the coding sequence of a single exogenous gene can be included. In the case of some large genes, it is even impossible to include the entire coding sequence. Furthermore, because introns are typically excluded, conventional gene transfer technology does not ensure that the normal splicing of mRNA occurs.

[0006] An alternative approach is to use gene therapy to upregulate endogenous genes for a therapeutic effect. There are many endogenous genes that could in principle be harnessed to reduce circuit hyperexcitability in the brain in order to achieve an anti-epileptic effect. Although such an approach would have an application to epilepsy it can be extended to other neurological and psychiatric diseases where the ability to modifying the expression of any desired gene or genes in the genome would represent a game-changing strategy.

[0007] Clustered Regularly Interspaced Short Palindromic Repeats (CRISPR) allow manipulation of endogenous genes and is based on using a nuclease-defective Cas9 protein in combination with one or more synthetic guide RNAs to recruit transcriptional enhancers or suppressors to their regulatory sequences.

[0008] This CRISPR-activation (CRISPRa) strategy has been used to decrease neuronal excitability and suppress seizures in a mouse model of acquired focal epilepsy (Colasante, Qiu et al., 2020; doi:10.1093/brain/awaa045). The CRISPRa technology was applied to increase the expression of the endogenous potassium channel gene KCNA1 (encoding Kv1.1) in hippocampal neurons.

[0009] CRISPRa can also be used to increase gene expression to rescue haploinsufficiency because it leads to a more graded upregulation than conventional transgene delivery. CRISPRa has been applied to treat a mouse model of severe childhood epilepsy (Dravet syndrome) caused by Scn1a haploinsufficiency (Colasante, Lignani et al.2019; https://doi.org/10.1016/i.ymthe.2019.08.018.) However, these approaches have thus far only been designed and validated in mice, and effective sgRNAs are poorly conserved between species.

[0010] Gene therapy is a promising candidate as a rational replacement for surgical treatment of pharmacoresistant focal epilepsy. Examples include overexpression of neuropeptide Y and Y2 receptors (Woldbye et al, 2010), Kv1.1 overexpression (Wykes et al, 2012; WO2018/229254); chemogenetics using designer receptors exclusively activated by designer drugs (DREADDs), e.g. hM4Di (WO2015/136247). Typically such gene therapies are based on delivery of single genes to modify neuronal excitability. These approaches are limited by the size of the transgene that can fit into the viral vector (AAV or lentivirus) and usually this means that only the coding sequence of a single gene can be included.

[0011] WO2021/191474 describes expression vectors or vector systems comprising a polynucleotide sequence encoding a polypeptide, wherein the gene is operably linked to a particular neuronal activity-dependent promoter suitable to drive expression of the gene product in a subject's neural cells. The features of the expression vectors combine to advantageously improve the treatment of a neurological disorder associated with neuronal hyperexcitability in a subject.

[0012] Nevertheless it can be seen that providing novel gene therapy approaches that address one or more of the drawbacks of these previous approaches would provide a useful contribution to the art.

### DISCLOSURE OF THE INVENTION

[0013] The invention is based on the provision of novel single guide RNAs (“sgRNAs”) comprising RNA targeting one or more endogenous human genes, that are capable of increasing the expression of endogenous human genes involved in neurological diseases and disorders. In some applications these sgRNAs, in combination with a nuclease-defective Cas9 or related enzymes such as Cas12, and a transcriptional activator, offer a novel approach to improved treatment of epilepsy and other neurological diseases, using CRISPRa.

[0014] Accordingly, in one aspect, the invention provides a targeting RNA for use in a method of treating a neurological disorder or disease in a human subject, wherein:
[0015] (i) the targeting RNA comprises a first targeting nucleic acid sequence with a specificity for a regulatory sequence of a first endogenous human gene associated with the neurological disorder; and
[0016] (ii) the method comprises administering to the subject:
   [0017] (a) single guide RNA (“sgRNA”), the sgRNA comprising the targeting RNA and a CRISPR nuclease binding region (“tracrRNA”); or
   [0018] (b) tracrRNA and crisprRNA (“crRNA”), the crRNA comprising the targeting RNA and a binding region for the tracrRNA;
   [0019] (c) a deactivated CRISPR nuclease (“dCas”); and
   [0020] (d) a transcriptional activator,
[0021] wherein the (i) sgRNA or (ii) crRNA and tracrRNA form a complex with the dCas and transcriptional activator in a cell of the subject, and increase expression of the first endogenous human gene.

[0022] The invention is also based on the provision of a combinatorial gene therapy approach using CRISPRa, to simultaneously increase the expression of multiple endogenous human genes in human subjects, in order to achieve a greater rescue of seizures and behavioural deficits. It is believed that targeting endogenous human genes that act through a different mechanism will further improve the ability to restore physiological brain function. The potential utility of combinatorial gene therapy is further based on several lines of evidence. Firstly, single-gene therapies have not been shown to completely stop seizures in rodent studies. Secondly, gene therapy approaches that have shown partial efficacy in rodents in our group and in others, have targeted several different signalling cascades including neuropeptide signalling, ion channels, chemogenetics and optogenetics. Current experimental gene therapies are typically based on delivery of single genes to modify neuronal excitability.

[0023] Accordingly, in another aspect of the invention:
[0024] (i) the targeting RNA comprises a second targeting nucleic acid sequence with a specificity for a regulatory sequence of a second endogenous human gene associated with the neurological disorder; and
[0025] (ii) the method comprises administering to the subject:
   [0026] (a) single guide RNA (“sgRNA”), the sgRNA comprising the targeting RNA and a CRISPR nuclease binding region (“tracrRNA”) for each targeting nucleic acid sequence; or
   [0027] (b) tracrRNA for each targeting nucleic acid sequence and crisprRNA (“crRNA”), the crRNA comprising the targeting RNA and a binding region for a tracrRNA;
   [0028] (c) a deactivated CRISPR nuclease (“dCas”) for complexing with the targeting nucleic acid sequences; and
   [0029] (d) a transcriptional activator for complexing with the targeting nucleic acid sequences,
[0030] wherein the targeting nucleic acid sequences of the (i) sgRNA or (ii) crRNA and tracrRNA form a complex with a dCas and a transcriptional activator in a cell of the subject, and increase expression of the first and second endogenous human genes.

[0031] In other aspects, the targeting RNA may further comprise a third, fourth, fifth or higher targeting nucleic acid with a specificity for a regulatory sequences of a third, fourth, fifth or higher endogenous human gene associated with the neurological disorder.

[0032] These aspects can finely regulate endogenous gene expression and allow graded upregulation of the potassium channel to reduce seizures.

[0033] In some particular cases, the method is a CRISPRa method.

[0034] The targeting RNA comprises a targeting nucleic acid sequence with a specificity for a target endogenous human gene. In some cases the targeting RNA, as part of a sgRNA/dCas/activator or crRNA/tracrRNA/dCas/activator complex, binds to the target endogenous human gene and not to off-target endogenous human genes, leading to the preferential alteration of expression of the target endogenous human gene. This may result from direct binding of the complex to the target endogenous human gene, but may also result from binding to a regulatory sequence. Thus, in some particularly preferred cases, the first targeting RNA sequence and second targeting RNA sequence, when present, target a regulatory sequence of the first endogenous human gene and second endogenous human gene respectively, optionally wherein the regulatory sequence is a promoter sequence. The targeting RNA sequences may also target at or near to the proximal promoter of the target human gene, or an enhancer at, near to or far from the target human gene.

[0035] The invention also provides a human regulatory sequence for the design of a targeting RNA as disclosed herein, the regulatory sequence consisting of a sequence of any one of SEQ ID NOs: 14-46. The regulatory sequence may be isolated. The invention also provides a targeting RNA comprising a targeting nucleic acid sequence with a specificity for a human regulatory sequence as disclosed herein. In some embodiments, the targeting nucleic acid sequence comprises or consists of a sequence selected from SEQ ID NOs: 1-3, 13, 49-55, 63-65, 69-71, 75-80, 87-89, 93-95, 99-101, 105-107, 111-113, and 117-119. In some embodiments, the targeting nucleic acid sequence comprises or consists of (i) a sequence selected from SEQ ID NOs: 1-3, 13, 49-55, 63-65, 69-71, 75-80, 87-89, 93-95, 99-101, 105-107, 111-113, and 117-119 and/or (ii) comprises or consists of SEQ ID NO: 1-3, 13, 49-55, 63-65, 69-71, 75-80, 87-89, 93-95, 99-101, 105-107, 111-113, and 117-119.

[0036] The invention also provides, in other aspects:
[0037] A targeting RNA comprising a first targeting nucleic acid sequence with a specificity for a first endogenous human gene associated with the neurological disorder, wherein the first targeting nucleic acid sequence is encoded by a sequence as disclosed herein.
[0038] A targeting RNA comprising a first targeting nucleic acid sequence with a specificity for a first endogenous human gene associated with the neurological disorder, and a second targeting nucleic acid sequence with a specificity for a second endogenous human gene associated with the neurological disorder, wherein the first and second targeting nucleic acid sequence are separately encoded by a sequence as disclosed herein.
[0039] A crRNA for use in a method of treating a neurological disorder in a human subject, or a crRNA, comprising a targeting RNA as disclosed herein, and a region for complexing to a CRISPR nuclease binding region (“tracrRNA”).
[0040] A guide RNA system for use in a method of treating a neurological disorder in a human subject, or a guide RNA system, comprising a crRNA as disclosed herein.
[0041] A single guide RNA (“sgRNA”) for use in a method of treating a neurological disorder in a human subject, or a sgRNA, comprising a targeting RNA or crRNA as defined herein, and a tracrRNA.
[0042] A composition for use in a method of treating a neurological disorder in a human subject, or a composition, comprising a sgRNA as disclosed herein, a deactivated CRISPR nuclease as disclosed herein, and a transcriptional activator as defined herein, optionally wherein the dCas is fused to the transcriptional activator.
[0043] An expression vector system for use in a method of treating a neurological disorder in a human subject, comprising:
   [0044] (i) a first vector comprising a polynucleotide sequence encoding a sgRNA as disclosed herein; and either
      [0045] (ii) a second vector comprising a polynucleotide sequence encoding a deactivated CRISPR nuclease fused to a transcriptional activator as defined herein; or
      [0046] (iii) a second vector comprising a polynucleotide sequence encoding a deactivated CRISPR nuclease as defined herein, and a third vector comprising a polynucleotide sequence encoding a transcriptional activator as defined herein.
[0047] An expression vector system for use in a method of treating a neurological disorder in a human subject, comprising:
   [0048] (i) a first vector comprising a polynucleotide sequence encoding a crRNA as disclosed herein;
   [0049] (i) a second vector comprising a polynucleotide sequence encoding a tracrRNA as defined herein; and either
      [0050] (iii) a third vector comprising a polynucleotide sequence encoding a deactivated CRISPR nuclease as defined herein fused to a transcriptional activator as defined herein; or
      [0051] (iv) a third vector comprising a polynucleotide sequence encoding a deactivated CRISPR nuclease as defined herein, and a fourth vector comprising a polynucleotide sequence encoding a transcriptional activator as defined herein.
[0052] An expression vector for use in a method of treating a neurological disorder in a human subject, or an expression vector, comprising:
   [0053] (i) a polynucleotide sequence encoding a crRNA as defined herein;
   [0054] (ii) a polynucleotide sequence encoding a tracrRNA as defined herein; and either
      [0055] (iii) a polynucleotide sequence encoding a deactivated CRISPR nuclease as defined in any one of the above claims fused to a transcriptional activator as defined in any one of the above claims; or
      [0056] (iv) a polynucleotide sequence encoding a deactivated CRISPR nuclease as defined in any one of the above claims and a polynucleotide sequence encoding a transcriptional activator as defined in any one of the above claims.
[0057] An expression vector system for use in a method of treating a neurological disorder in a human subject, or an expression vector system, comprising:
   [0058] (i) a first vector comprising a polynucleotide sequence encoding a first sgRNA as defined herein, wherein the targeting RNA only targets a first endogenous human gene;
   [0059] (ii) a second vector comprising a polynucleotide sequence encoding a second sgRNA as defined herein, wherein the targeting RNA only targets a second endogenous human gene; and either
      [0060] (iii) a third vector comprising a polynucleotide sequence encoding a deactivated CRISPR nuclease as defined in any one of the above claims fused to a transcriptional activator as defined in any one of the above claims; or
      [0061] (iv) a third vector comprising a polynucleotide sequence encoding a deactivated CRISPR nuclease as defined in any one of the above claims and a fourth vector comprising a polynucleotide sequence encoding to a transcriptional activator as defined in any one of the above claims.
[0062] An in vitro method of making viral particles comprising (i) transducing mammalian cells with an expression vector or expression vector system as defined herein and expressing viral packaging and envelope proteins necessary for particle formation in the cells; and culturing the transduced cells in a culture medium, such that the cells produce viral particles that are released into the medium.
[0063] A kit comprising an expression vector or expression vector system as defined herein and one or more viral packaging and envelope expression vectors that encode viral packaging and envelope proteins necessary for particle formation when expressed in a cell.
[0064] A method of treatment of a neurological disorder as defined herein, comprising administering to an individual with the neurological disorder an expression vector or vector system as defined herein.
[0065] A method of determining the expression of a first and/or second endogenous human gene as defined herein, comprising (i) transducing a cell with an expression vector or expression vector system as defined herein or administering a viral particle as defined herein to a cell under conditions that permit expression of the first human gene and/or second gene; and (ii) measuring the amount of the expression product of the first human gene and/or second gene, and comparing it to the amount of the expression product of the first human gene and/or second gene in a cell not transduced with expression vector, expression vector system or viral particle.
[0066] A cell comprising the expression vector or expression vector system as defined herein.
[0067] A targeting RNA system for use in a method of treating a neurological disorder or disease in a human subject as defined herein, wherein:
   [0068] (i) the targeting RNA system comprises:
      [0069] (a) a first targeting RNA comprising a first targeting nucleic acid sequence with a specificity for a regulatory sequence of a first endogenous human gene associated with the neurological disorder; and
      [0070] (b) a second targeting RNA comprising a second targeting nucleic acid sequence with a specificity for a regulatory sequence of a second endogenous human gene associated with the neurological disorder; and
   [0071] (ii) the method comprises administering to the subject:
      [0072] (a) a first single guide RNA (“sgRNA”) comprising the first targeting RNA and a CRISPR nuclease binding region (“tracrRNA”) and a second single guide RNA (“sgRNA”), comprising the second targeting RNA and a CRISPR nuclease binding region (“tracrRNA”) or
      [0073] (b) first tracrRNA and first crisprRNA (“crRNA”), the first crRNA comprising the first targeting RNA and a binding region for a tracrRNA, and second tracrRNA and second crisprRNA (“crRNA”), the second crRNA comprising the second targeting RNA and a binding region for a tracrRNA; and
      [0074] (c) a deactivated CRISPR nuclease (“dCas”) for complexing with each targeting nucleic acid sequence; and
      [0075] (d) a transcriptional activator for complexing with each targeting nucleic acid sequence,
[0076] wherein each sgRNA or crRNA forms a complex with a dCas and a transcriptional activator in a cell of the subject, and increase expression of the first and second endogenous human genes.

[0077] Some further aspects and embodiments of the invention will now be discussed in more detail. The following embodiments may be applied in combination with the various targeting RNA, crRNA, sgRNA, guide RNA systems, compositions, expression vectors, expression vector systems, human regulatory sequences, kits, particles and methods of the invention, even if those embodiments are disclosed in the context of particular aspects.

### CRISPR Activation (“CRISPRa”)

[0078] As used herein, the term “CRISPR” refers to Clustered Regularly Interspaced Short Palindromic Repeat systems or loci, or a derivative thereof. CRISPR loci can be found in the genomes of many bacteria and archaea. There are four types of CRISPR systems (e.g., Type I, Type II, Type Ill, and Type U).

[0079] The DNA editor/regulator CRISPR/Cas9 (Konermann et al., 2015; Dominguez et al., 2016; Adli, 2018) represents a powerful tool to modify endogenous genes, not only in somatic cells but also in mammalian neurons (Heidenreich and Zhang, 2016; Suzuki et al., 2016). In addition to permanently altering endogenous gene sequences, CRISPR/Cas9 can regulate the activity of genes through promoter modulation, an approach known as CRISPR activation (CRISPRa) (Dominguez et al., 2016; Liao et al., 2017; Matharu et al., 2019).

[0080] The CRISPRa system consists of a nuclease-defective Cas9 (dCas9) fused to a transcription activator and a single guide RNA (sgRNA) that targets dCas9 to the promoter of the target human endogenous gene (Dominguez et al., 2016). The sgRNA comprises targeting RNA of the invention.

[0081] There are multiple advantages of this system. First, it is versatile because the targeted gene can be switched by changing the sgRNA. Second, CRISPRa preserves the full range of native splice variants and protein biogenesis mechanisms (Liao et al., 2017). Third, CRISPRa is, in principle, safe because it only alters the promoter activity of genes that are already transcribed in targeted neurons. Finally, CRISPRa can be targeted to specific neurons in the epileptic focus using established viral vectors (La Russa and Qi, 2015).

### Targeting Nucleic Acid Sequences

[0082] As already mentioned, the targeting RNA comprises a targeting nucleic acid sequence with a specificity for a target endogenous human gene. In some cases this means that the targeting RNA, as part of a sgRNA/cas or crRNA/tracrRNA/cas complex, binds to the target endogenous human gene and not off-target endogenous human genes, leading to the preferential alteration of expression of the target endogenous human gene. This may result from direct binding of the complex to the target endogenous human gene, but may also result from binding to a regulatory sequence. Thus, in some particularly preferred cases, the first targeting RNA sequence and second targeting RNA sequence, when present, target a regulatory sequence of the first endogenous human gene and second endogenous human gene respectively, optionally wherein the regulatory sequence is a promoter sequence. In some preferred embodiments, the first and second targeting RNA sequence are different.

[0083] In some embodiments, (i) the first targeting nucleic acid sequence has at least 70, 75, 80, 85, 90, 91, 92, 93, 94, 95, 96, 97, 98 or 99% sequence identity to a sequence selected from SEQ ID NOs: 1-3, 13, 49-55, 63-65, 69-71, 75-80, 87-89, 93-95, 99-101, 105-107, 111-113, and 117-119; and/or (ii) the second targeting nucleic acid sequence, when present, has at least 70, 75, 80, 85, 90, 91, 92, 93, 94, 95, 96, 97, 98 or 99% sequence identity to SEQ ID NO: 1-3, 13, 49-55, 63-65, 69-71, 75-80, 87-89, 93-95, 99-101, 105-107, 111-113, and 117-119. In some embodiments, (i) the first targeting nucleic acid sequence comprises or consists of a sequence selected from SEQ ID NOs: 1-3, 13, 49-55, 63-65, 69-71, 75-80, 87-89, 93-95, 99-101, 105-107, 111-113, and 117-119; and/or (ii) the second targeting nucleic acid sequence, when present, comprises or consists of SEQ ID NO: 1-3, 13, 49-55, 63-65, 69-71, 75-80, 87-89, 93-95, 99-101, 105-107, 111-113, and 117-119. In some particularly preferred embodiments, the first targeting nucleic acid sequence and second targeting nucleic acid sequence are different.

[0084] In some embodiments, (i) the first targeting nucleic acid sequence is encoded by or specifically hybridizes to a nucleic acid sequence that has at least 70, 75, 80, 85, 90, 91, 92, 93, 94, 95, 96, 97, 98 or 99% sequence identity to a sequence selected from SEQ ID NOs: 1-3, 13-46, 49-122, 124-129, or 131-38; and/or (ii) the second targeting nucleic acid sequence, when present, is encoded by or specifically hybridizes to a nucleic acid sequence that has at least 70, 75, 80, 85, 90, 91, 92, 93, 94, 95, 96, 97, 98 or 99% sequence identity to a sequence selected from SEQ ID NOs: 1-3, 13-46, 49-122, 124-129, or 131-38. In some embodiments, (i) the first targeting nucleic acid sequence is encoded by or specifically hybridizes to a nucleic acid sequence that comprises or consists of a sequence selected from SEQ ID NOs: 1-3, 13-46, 49-122, 124-129, or 131-38; and/or (ii) the second targeting nucleic acid sequence, when present, is encoded by or specifically hybridizes to a nucleic acid sequence that comprises or consists of a sequence selected from SEQ ID NOs: 1-3, 13-46, 49-122, 124-129, or 131-38.

[0085] Alignment and calculation of percentage amino acid or nucleotide sequence identity can be achieved in various ways known to a person of skill in the art, for example, using publicly available computer software such as ClustalW 1.82, T-coffee or Megalign (DNASTAR) software. When using such software, the default parameters, e.g. for gap penalty and extension penalty, are preferably used. The default parameters of ClustalW 1.82 are: Protein Gap Open Penalty =10.0, Protein Gap Extension Penalty=0.2, Protein matrix=Gonnet, Protein/DNA ENDGAP=−1, Protein/DNA GAPDIST=4.

[0086] The percentage identity can then be calculated from the multiple alignment as (N/T)*100, where N is the number of positions at which the two sequences share an identical residue, and T is the total number of positions compared. Alternatively, percentage identity can be calculated as (N/S)*100 where S is the length of the shorter sequence being compared. The amino acid/polypeptide/nucleic acid sequences may be synthesised de novo, or may be native amino acid/polypeptide/nucleic acid sequence, or a derivative thereof.

[0087] In general, due to the degeneracy of the genetic code, it is clear that any nucleic acid sequence could be varied or changed without substantially affecting the sequence of a protein encoded thereby, to provide a functional variant thereof. Suitable nucleotide variants are those having a sequence altered by the substitution of different codons that encode the same amino acid within the sequence, thus producing a silent change. Other suitable variants are those having homologous nucleotide sequences but comprising all, or portions of, sequence which are altered by the substitution of different codons that encode an amino acid with a side chain of similar biophysical properties to the amino acid it substitutes, to produce a conservative change.

[0088] In some embodiments, the targeting RNA may be generated from a human regulatory sequence as defined herein. Such targeting RNA may be generated by bioinformatic analysis as described in e.g. Colasante 2020. Encyclopedia of DNA Elements (ENCODE) and the Functional ANnoTation of the Mammalian genome (FANTOM) (Carninci et al., 2006) databases may be used to download transcriptomics and epigenetics NGS data for a target endogenous human gene. Tracks can be visualized along the human reference genome with the Integrative Genome Viewer (IGV) (Thorvaldsdottir et al., 2013). Relevant promoter sequences 600 bp before the estimated Transcription Starting Site (TSS) can be used to design the sgRNAs with CHOPCHOP (http://chopchop.cbu.uib.no/).

[0089] In some embodiments, the targeting RNA comprises a sequence according to any one of the Figures, for Example FIGS. 16-78. In some aspects, the invention provides a nucleotide comprising or consisting of a sequence that has at least 70%, 75%, 80%, 85%, 90%, 95%, 96%, 97%, 98%, 99% or 100% sequence identity to a sequence selected from SEQ ID NOs: 1-138.

sgRNA, Guide RNA Systems, crRNA and tracrRNA

[0090] In some aspects the invention provides sgRNA, guide RNA systems, crRNA that comprise targeting RNA of the invention.

[0091] Single guide RNA (“sgRNA”) comprises crRNA (“CRISPR RNA”) and tracrRNA (“trans-activating CRISPR RNA”), and is able to complex with CRISPR nucleases via the tracrRNA region. Guide RNA systems comprise crRNA (“CRISPR RNA”) and tracrRNA (“trans-activating CRISPR RNA”), wherein the crRNA and tracrRNA are not covalently bonded, and is able to complex with CRISPR nucleases via the tracrRNA region.

[0092] crRNA may comprise targeting RNA of the invention, which may be separated by palindromic repeat sequences. tracrRNA, or “scaffold regions”, enable complexation of crRNA and sgRNA to a CRISPR nuclease. In some embodiments, the scaffold region comprises an ms2, f6, PP7, com, or L7a ligand sequence. In some embodiments, the scaffold region of the guide RNA in a cas complex is bound to a transcriptional activation domain fused to an MCP polypeptide, a COM polypeptide, a PCP polypeptide, or an L7a polypeptide. The tracrRNA can pair with crRNA to form a functional guide RNA, which can complex with a CRISPR nuclease.

[0093] The sgRNA may be synthetic sgRNA.

[0094] In some cases, the targeting RNA as part of a sgRNAcas or crRNAtracrRNAcas complex targets a target human endogenous gene with 100% efficiency. In some cases, the targeting RNA has at least 70%, 75%, 80%, 85%, 90%, 91%, 92%, 93%, 94%, 95%, 96%, 97%, 98%, 99%, or has 100%, sequence identity to promoter sequence of the target human endogenous gene sequence. The sgRNA or crRNA may be constitutively expressed and operably linked to a separate promoter, such as RNA polymerase Ill (e.g. U6). The separate promoter may also be any promoter suitable to express sgRNA or crRNA, such as an RNA polymerase, for example RNA polymerase II. The sgRNA and separate promoter may also be comprised by, or separate to, the expression vectors and vector systems disclosed herein. In some cases, the sgRNA or crRNA may also be operably linked to an activity-dependent promoter as disclosed herein, such as cfos, or to an inducible promoter such as Tet-On.

[0095] In some cases, the targeting RNA as part of a sgRNAcas or crRNA/tracrRNAcas complex targets a target human endogenous gene and causes upregulation of the target human endogenous gene. Upregulation may lead to 2×, 3×, 4×, 5×, 6×, 7×, 8×, 9× or 10× increase in normalised mRNA expression of the target endogenous gene, e.g. as measured by quantitative RT-PCR. In some embodiments, upregulation of the target human endogenous gene is measured as an increase relative to an sgRNA Lac Z control, e.g. SEQ ID NO: 4 or 47. The increase may also be measured relative to SEQ ID NO: 11, 48, 123 or 130. Other functional activities may be measured as changes relative to these sequences. In some embodiments, this measurement can be performed as follows:

[0096] RNA is extracted from primary neurons and cells using TRI ReagentVR (Sigma) according to the manufacturer's instructions. For quantitative RT-PCR (RT-qPCR), cDNA synthesis is obtained using the ImProm-II™ Reverse Transcription System (Promega) and RT-qPCR is carried out with custom designed oligonucleotides using the Titan HotTaq EvaGreenVR qPCR Mix (BIOATLAS). Analysis of relative expression is performed using the DDCT method, relative to the Ctrl-dCas9A condition. To determine Kcna1 expression in vivo and for RNA-Seq, RNA is extracted from frozen tissues. For qPCR, DDCT was determined in Ctrl-dCas9A or in Kcna1-dCas9A injected hippocampi relative to contralateral hippocampi in epileptic animals at the end of the recordings.

[0097] Upregulation may also be quantified via amount of endogenous human gene product. This may be measured by western blot. In some embodiments, this may be performed as follows: Total neuronal protein extracts are obtained from the lysis of primary neurons by RIPA lysis buffer (150 mM NaCl, 1% Triton, 0.5% sodium deoxycholate, 0.1% sodium dodecyl sulphate, Tris pH 8.0 50 mM, protease inhibitor cocktail) 2 weeks after infection with the CRISPRa-Kcna1 system. Lysates are kept on ice for 30 min by vortexing every 10 min and then centrifuged at 4_C for 5 min at 5000 rpm. Supernatants with solubilized proteins are collected in new tubes and stored at −80° C. until use. Western blot analysis is performed using primary antibodies against the endogenous human gene products.

[0098] Measurement of off-targets may also be performed by the same methods. Putative off-targets may be predicted as follows:

[0099] Using the Galaxy web-tool (https://usegalaxy.org/) two datasets are generated: one containing sgRNA off-target sequences predicted by the CRISPOR web tool (http://crispor.tefor.net) and one containing all the 500-bp genomic regions (NCBI37/mm9) upstream to transcription start sites of annotated transcripts. Intersecting the two datasets, all sgRNA off-target sequences in putative gene promoters are derived. To identify genes regulated by putative promoters, the sequence of the predicted off-targets are aligned by IGV to the reference genome and to transcripts annotated in ENSEMBL database. Validation of expression levels of putative off-target genes was performed by RT-qPCR.

[0100] RNA sequencing of targeting RNA and mRNA can be performed as follows:

[0101] RNA libraries for both in vitro and in vivo experiments are generated starting from 1 Ig of total RNA extracted from control and sgRNA-dCas9A neurons at 10 DIV. RNA quality is assessed using a TapeStation instrument (Agilent) and only RNA samples with integrity number (RIN) 58 are analysed. For in vitro experiments, RNA is processed according to the Lexogen QuantSeq 3′ mRNA-Seq Library Prep Kit protocol and the libraries are sequenced on an Illumina NextSeq 500 with 75-bp stranded reads at CTGB, Ospedale San Raffaele. Fastq files are aligned to the mouse genome (NCBI37/mm9) with Bowtie2. For in vivo experiments, RNA is processed according to the TruSeq Stranded mRNA Library Prep Kit protocol. The libraries are sequenced on an Illumina HiSeq 3000 with 76 bp stranded reads using Illumina TruSeq technology at Genewiz. Image processing and base calling are performed using the Illumina Real Time Analysis Software. Fastq files are mapped to the mm10 mouse reference genome with the STAR aligner v2.7. Differential gene expression and functional enrichment analyses are performed with DESeq2 and GSEA, respectively. Statistical and downstream bioinformatics analyses are performed within the R environment. Gene expression heat maps are produced with GENE-E (Broad Institute). Data of in vitro and in vivo experiments are deposited in the NCBI Gene Expression Omnibus repository with a GEO ID.

### The Transcriptional Activator

[0102] As defined herein, transcriptional activators are protein domains or whole proteins that may be linked to the dCas (e.g. dCas9) or sgRNAs, and that assist in the recruitment of important co-factors as well as RNA Polymerase for transcription of the gene(s) targeted by the system. In order for a protein to be made from the gene that encodes it, RNA polymerase must make RNA from the DNA template of the gene during a process called transcription. Transcriptional activators have a DNA binding domain and a domain for activation of transcription. The activation domain can recruit general transcription factors or RNA polymerase to the gene sequence. Activation domains can also function by facilitating transcription by stalled RNA polymerases, and in eukaryotes can act to move nucleosomes on the DNA or modify histones to increase gene expression.

[0103] In some embodiments, the transcriptional activator is for complexing with the dCas. In some embodiments, the transcriptional activator is fused to dCas. In other embodiments, the transcriptional activator is bound to the sgRNA, targeting RNA, tracrRNA or crRNA. The transcriptional activator may be any defined herein.

[0104] The transcriptional activator, along with dCas, may complex both targeting nucleic acid sequences simultaneously, randomly, or at different times.

### The CRISPR Nuclease

[0105] In some embodiments, the CRISPR nuclease comprises (i) a nuclease domain that has been modified to eliminate nuclease and nicking activity and (ii) a transcriptional activation domain. In some embodiments, the CRISPR nuclease comprises a D10A, H840A S. pyogenes dCas9 (“spdCas9”). In some embodiments, the CRISPR nuclease comprises a S. aureus dCas9 (“sadCas9”). In some embodiments the S. aureus dCas9 comprises one or more mutations in one of the following residues: E782, K929, N968, R1015. In some cases, use of sadCAS9 is advantageous as it can permit all gene elements to be comprised by a single expression vector.

[0106] In some cases, the CRISPR nuclease is dCas9 or dCas12.

[0107] As used herein, the terms “Cas9,” “Cas9 molecule,” and the like, refers to a Cas9 polypeptide or a nucleic acid encoding a Cas9 polypeptide. A “Cas9 polypeptide” is a polypeptide that can form a complex with a guide RNA (gRNA) and bind to a nucleic acid target containing a target domain and, in certain embodiments, a PAM sequence. Cas9 molecules include those having a naturally occurring Cas9 polypeptide sequence and engineered, altered, or modified Cas9 polypeptides that differ, e.g., by at least one amino acid residue, from a reference sequence, e.g., the most similar naturally occurring Cas9 molecule. A Cas9 molecule may be a Cas9 polypeptide or a nucleic acid encoding a Cas9 polypeptide. A Cas9 molecule may be a nuclease (an enzyme that cleaves both strands of a double-stranded nucleic acid), a nickase (an enzyme that cleaves one strand of a double-stranded nucleic acid), or a catalytically inactive (or dead) Cas9 molecule. A Cas9 molecule having nuclease or nickase activity is referred to as a “catalytically active Cas9 molecule” (a “caCas9” molecule). A Cas9 molecule lacking the ability to cleave or nick target nucleic acid is referred to as a “catalytically inactive Cas9 molecule” (a “ciCas9” molecule) or a “dead Cas9” (“dCas9”).

[0108] In certain embodiments, the dCas9 molecule is a S. pyogenes dCas9 variant. In certain embodiments, the dCas9 variant is the EQR variant. In certain embodiments, the dCas9 variant is the VRER variant. In certain embodiments, a dCas9 system comprises a dCas9 molecule, e.g., a dCas9 molecule described herein, e.g., the dCas9 EQR variant or the dCas9 VRER variant. In certain embodiments, the dCas9 molecule is a S. aureus dCas9 variant.

[0109] In some embodiments, the dCas comprises a transcriptional activation binding domain, wherein the transcriptional activation binding domain specifically binds a composition comprising one or more transcriptional activation domains.

[0110] In some embodiments, the dCas is fused to a transcriptional activation domain.

[0111] The dCas, along with the transcriptional activator, may complex both targeting nucleic acid sequences simultaneously, randomly, or at different times. The dCas, when fused with the transcriptional activator, may complex both targeting nucleic acid sequences simultaneously, randomly, or at different times.

[0112] In some embodiments, the transcriptional activation domain is VP16, VP64 or VP160. The transcriptional activation domain may also be selected from the group consisting of HSFI, VP16, VP64, p65, MyoDI, RTA, SET7/9, VPR, histone acetyltransferase p³⁰⁰, an hydroxylase catalytic domain of a TET family protein (e.g., TET1 hydroxylase catalytic domain), LSD1, CIB1, AD2, CR3, EKLF1, GATA4, PRVIE, p⁵³, SPI, MEF2C, TAX, and PPARy.

[0113] In some embodiments, the dCas is a dCas -VP64 fusion polypeptide. In some embodiments, the dCas is a dCas -VP160 fusion polypeptide. In some embodiments, the dCas is a dCas-VP16 fusion polypeptide.

[0114] In some cases, the dCas or dCas-VP64 fusion polypeptide further comprises aptamers that bind to MS2 proteins, which may recruit additional activations domains, e.g. HS1 and p65. In some cases, the transcriptional activator is HS1 or p65. In some cases, the dCas is fused to a repeating peptide array fused with multiple copies of VP64. In some cases, the dCas-VP64 fusion polypeptide further comprises p65 and/or Rta, which work in tandem to recruit transcription factors. In some cases, the dCas is fused to CBP, a histone acetyltransferase domain capable of rearranging chromatin structure. In some cases, any of the fusion polypeptides disclosed herein are further fused to the P65-HSF activation domain.

[0115] In certain embodiments, a CRISPR nuclease contains (i.e., is covalently or non-covalently linked to) one or more additional polypeptides or nucleic acids. For example, the CRISPR nuclease can be fused at an amino or carboxy-terminus to one or more transcriptional activation domain polypeptides, one or more DNA-binding polypeptides, one or more affinity tags (e.g., in complex with one or more affinity tag ligands, such as affinity tag ligand-transcriptional activation domain fusion protein(s)), nuclear localization sequences, or a combination thereof.

[0116] In some cases, the CRISPR nuclease is fused to one or more affinity tags. For example, the CRISPR nuclease may be a component of a SunTag. Exemplary SunTags or SunTag components include, without limitation, one or more of the affinity tagged CRISPR nucleases or affinity tag ligands, and fusion proteins thereof, described in WO 2016/011070. In one embodiment, the CRISPR nuclease contains one or more affinity tags that are non-covalently bound to one or more ligand-transcriptional activation domain fusion proteins. In such embodiments, the transcriptional activation domain fused to the affinity tag ligand can be, e.g., one or more of the transcriptional activation domains described herein.

[0117] FIG. 12 shows a schematic of one embodiment of the invention, whereby a dCas9 is fused to a VP160 transcriptional activation domain, and is complexed to a sgRNA. Complexation to the promoter region of the target endogenous gene leads to increased expression of the target endogenous gene.

### Preferred Genes and Gene Products

[0118] In some preferred embodiments, the first endogenous human gene and second endogenous human gene, when present, are selected from the group consisting of: GABRA5, KCNA1, KCNA2, LGI1, KCNC1, KCNMA1, KCNK2, KCNQ2, KCNQ3, KCNJ6, GRM2, GDNF, NPY, NPY2R, GALP, GALR1, PDYN, BDNF, FGF2, GABBR1, GABBR2, GRM3, GRM4, GRM7, GABRR1, GABRR3, OPRK1, OPRM1, OPRD1, OPRL1, KCNJ2, GABRA1, and GABRA2.

[0119] In some other preferred embodiments, the first endogenous human gene and second endogenous human gene, when present, are selected from the group consisting of: BDNF, FGF2, GABBR1, GABBR2, GABRA1, GABRA2, GABRA5, GALP, GALR1, GDNF, GRM2, KCNA1, KCNA2, KCNC1, KCNJ2, KCNJ6, KCNK2, KCNMA1, KCNQ2, KCNQ3, LGI1, NPY, NPY2R, OPRD1, OPRK1, OPRL1, OPRM1, and PDYN.

[0120] All aspects of the invention encompass use of all combinations of genes disclosed herein as the first endogenous human gene and second endogenous human gene. All aspects of the invention also encompass all combinations of genes disclosed in the preceding two paragraphs as the first endogenous human gene and second endogenous human gene. For example, the first and second endogenous human genes may be, respectively: GABRA5 and KCNA1, GABRA5 and KCNA2, GABRA5 and LGI1 . . . KCNA1 and GABRA5, KCNA1 and KCNA2, KCNA2 and LGI1 . . . PDYN and OPRL1 or PDYN and OPRM1.

[0121] In some preferred embodiments, the first human gene is GABRA5, and optionally the second gene is KCNA1. In some preferred embodiments, the first human gene is KCNQ2, and optionally the second gene is KCNQ3. In some preferred embodiments, the first human gene is KCNA2, and optionally the second gene is LGI1. In some preferred embodiments, the first human gene is KCNQ3, and optionally the second gene is LGI1. In some preferred embodiments, the first human gene is KCNA2, and optionally the second gene is KCNJ2.

[0122] In some preferred embodiments, the first endogenous human gene and second endogenous human gene are associated with different mechanisms of action of control of neural activity. By mechanism of action of control of neural activity, it is meant a particular molecular pathway that the gene is implicated in, whose dysfunction may lead to neurological disorders or diseases.

[0123] In some preferred embodiments, the first endogenous human gene is associated with action potential inhibition and synaptic vesicle release, and the second endogenous human gene is associated with tonic inhibition. In some particularly preferred embodiments, the first endogenous human gene is GABRA5 and the second endogenous human gene is KCNA1.

[0124] In some preferred embodiments, the first endogenous human gene is a subunit of a channel or receptor associated with neuronal excitability or synaptic transmission, and the second endogenous human gene is another subunit of the same channel receptor. In some particularly preferred embodiments, the first endogenous human gene is KCNQ2 and the second endogenous human gene is KCNQ3.

[0125] In some preferred embodiments, the first endogenous human gene is associated with decreasing neuronal excitability, and the second endogenous human gene is associated with action potential and vesicle release inhibition. In some particularly preferred embodiments, the first endogenous human gene is KCNJ2 and the second endogenous human gene is KCNA2.

[0126] In some preferred embodiments, the first endogenous human gene is a subunit of a channel or receptor associated with decreasing neuronal excitability, and the second endogenous human gene is associated with decreasing synaptic transmission. In some particularly preferred embodiments, the first endogenous human gene is KCNQ3 and the second endogenous human gene is LGI1.

[0127] GABRA5 encodes the alpha5 subunit of GABAA receptors that contribute to tonic inhibition, which are downregulated in epileptic animals both before and after the therapy. Loss of function GABRA5 mutations have been associated with severe epileptic encephalopathies (Butler et al 2018; Hernandez et al. 2019). Targeting of GABRA5 in combination with KCNA1 is particularly preferred because Gabra5 was found to be downregulated in a rodent model of epilepsy and not rescued by a first-pass CRISPRa approach targeting Kcna1 alone. alpha5 GABAA receptors have a different mechanism of action than Kv1.1, encoded by KCNA1, which regulates action potential initiation and synaptic vesicle release (Vivekananda et al 2017).

[0128] KCNA1 encodes the Kv1.1 potassium channel which is a voltage-gated delayed-rectifier potassium channel that is phylogenetically related to the Drosophila Shaker channel. Voltage-dependent potassium channels modulate excitability by opening and closing a potassium-selective pore in response to voltage. In many cases, potassium ion flow can be interrupted when an intracellular particle occludes the pore, a process known as fast inactivation. Kv1 potassium channel subunits have six putative transmembrane segments, and the loop between the fifth and sixth segment of each of the four Kv1 subunits that make up a complete channel forms the pore.

[0129] In other embodiments, the gene encodes another protein that affects neuronal excitability or neurotransmitter release, including other potassium channels such as Kv1.2, or neurotransmitter receptors such as GABAA or GABAB receptors, adenosine A1 receptors, and NPY Y2 or Y5 receptors, or neuropeptides such as galanin, NPY or dynorphin.

[0130] In some preferred embodiments, the gene is defined in the claims as KCNJ2. KCNJ2 encodes the inward-rectifying potassium chancel Kir2.1, which is normally expressed in skeletal muscle. Kir2.1 contributes to maintaining a negative resting membrane potential, thus reducing intrinsic excitability.

[0131] In some preferred embodiments, the gene is defined in the claims as KCNQ2 or KCNQ3. They encode subunits of the voltage-gated potassium channel Kv7. Heterodimers of these subunits showed an 11-fold greater potassium current than either homomeric channel (Barrese et al. 2018). Kv7 is activated at subthreshold potentials and therefore contributes to maintaining the membrane potential of neurons near the resting value, and consequently reducing intrinsic neuronal excitability (Shah et al. 2008).

[0132] KCNA2 encodes the Kv1.2 potassium channel, which is a delayed rectifier voltage-gated potassium channel. Kv1.2 maintains the resting membrane potential and, consequently, reduces neuronal excitability. Kv1.2 subunits can co-assemble with other Kv1 subunits.

[0133] LGI1 encodes LGI1, a secreted synaptic protein which reduces network excitability (Lugara et al. 2019). Loss-of-function mutations cause human partial epilepsy. LGI1 regulates the activity of voltage-gated potassium channels including those consisting of Kv1.1 and Kv1.2 subunits.

[0134] In some embodiments, the first and/or second human endogenous gene is implicated in diseases associated with haploinsufficiency, such as SIM1, Leptin, Leptin receptor, MC4R, SCN2A, SETD5, PAX6, PKD1, MC3R, POMC, STAT 3, STAT5, SOCS3, GHR, NPY, NPY1R, NPY2R, NPY5R, PYY, AMPK (PRKAA1, PRKAA2, PRKAB1, PRKAB2, PRKAG1, PRKAG2, PRKAG3), OXT, JAK2, SHP2, NOS3, NROB2, BRS3, CARTPT, FABP4, HTR2C, IL6, NHLH2, NMU, NPB, NPBWR1, PNPLA2, UCP3, ADIPOQ, APOA5, ARNT2, ASIP, C1QTNF2, C3AR1, CCK, CPT1B, CSF2, DGAT1, DGAT2, GHRL, GHSR, HSDIIBI, HTR7, INSIG1, INSIG2, LIPC, NMUR1, NMUR2, NPBWR2, NTS, PPARGCIA, PPY, RETN, SIRT1, TGFBR2, WDTC1, or FOXOI.

[0135] In some embodiments, the regulatory sequence of said genes is a regulatory sequence consisting of a sequence of any one of SEQ ID NOs: 14-46.

### Expression Vectors and Vector Systems

[0136] In some aspects the invention provides expression vectors and expression vector systems that comprise targeting RNA of the invention.

[0137] An expression vector as used herein is a DNA molecule used to transfer and express foreign genetic material in a cell. Such vectors include a promoter sequence operably linked to the gene encoding the protein to be expressed.

[0138] “Promoter” means a minimal DNA sequence sufficient to direct transcription of a DNA sequence to which it is operably linked. “Promoter” is also meant to encompass those promoter elements sufficient for promoter-dependent gene expression controllable for cell type specific expression; such elements may be located in the 5′ or 3′ regions of the native gene. Alternatively, an expression vector may be an RNA molecule that undergoes reverse transcription to DNA as a result of the reverse transcriptase enzyme. In some cases, the promoter is modified to allow for incorporation of the first and second targeting RNA sequences, and optionally the deactivated CRISPR nuclease, into a single expression vector. The promoter may be CaMKII, CMV, or any other promoter suitable to drive expression of one or more genes comprised by the expression vector. Each gene comprised by the expression vector may be operably linked to a suitable promoter, or all genes comprised by the expression vector may be operably linked to a single suitable promoter.

[0139] An expression vector may also include a termination codon and expression enhancers. Any suitable vectors, enhancers and termination codons may be used to express the gene products. Suitable vectors include plasmids, binary vectors, phages, phagemids, viral vectors and artificial chromosomes (e.g. yeast artificial chromosomes or bacterial artificial chromosomes). As described in more detail below, preferred expression vectors include viral vectors such as AAV vectors.

[0140] An expression vector may additionally include a reporter gene encoding a reporter protein. An example of a reporter protein is a green fluorescent protein (“GFP”). A reporter gene may be operably linked to its own promoter or, more preferably, may be operably linked to the same promoter as the gene product as defined in the invention. As an example, the KCNA1 gene and reporter gene may be located either side of a sequence encoding a 2A peptide, such as a T2A peptide. 2A peptides are short (˜20 amino acids) sequences that permit multicistronic gene expression from single promoters by impairing peptide bond formation during ribosome-mediated translation (Szymczak and Vignali, 2005). Having the reporter gene operably linked to the same promoter as the gene product, is thought to act as a reliable indicator of gene product expression. An expression vector including a reporter gene may be particularly useful in preclinical applications, for example for use in animal models where it can be used to help assess the localisation of gene expression. The gene encoding GFP may be GFP, dsGFP or dscGFP.

[0141] In other embodiments, the expression vector lacks a sequence encoding a reporter protein. This may be preferred for regulatory reasons, for example. In embodiments of the invention, reporting or detecting the gene product of the disclosure may be achieved in different ways—for example based on its engineered sequence. In some embodiments, the expression vector lacks a sequence encoding GFP and/or a sequence encoding a 2A peptide, such as a T2A peptide.

[0142] Generally speaking, those skilled in the art are well able to construct vectors and design protocols for recombinant gene expression. Suitable vectors can be chosen or constructed, containing, in addition to the elements of the invention described above, appropriate regulatory sequences, including promoter sequences, terminator fragments, polyadenylation sequences, marker genes and other sequences as appropriate. Molecular biology techniques suitable for the expression of polypeptides in cells are well known in the art. For further details see, for example, Molecular Cloning: a Laboratory Manual: 2nd edition, Sambrook et al, 1989, Cold Spring Harbor Laboratory Press or Current Protocols in Molecular Biology, Second Edition, Ausubel et al. eds., John Wiley & Sons, (1995, and periodic supplements).

[0143] The term “operably linked” used herein includes the situation where a selected gene and promoter are covalently linked in such a way as to place the expression of the gene (i.e. polypeptide coding) under the influence or control of the promoter. Thus, a promoter is operably linked to a gene if the promoter is capable of effecting transcription of the gene into RNA in a cell. Where appropriate, the resulting RNA transcript may then be translated into a desired protein or polypeptide. The promoter is suitable to effect expression of the operably linked gene in a mammalian cell.

[0144] Preferably, the mammalian cell is a human cell.

[0145] In some embodiments, the vector or vector system is a viral vector or vector system, optionally wherein the viral vector or vector system is a recombinant adeno-associated virus (AAV) vector or vector system, or a lentiviral vector or vector system, optionally wherein the lentiviral vector or vector system is a non-integrating lentiviral vector or vector system.

[0146] In some embodiments, either:
[0147] (i) the polynucleotide sequence encoding the crRNA or sgRNA is operably linked to an RNA polymerase Ill promoter, optionally a U6 promoter; or
[0148] (ii) the polynucleotide sequence encoding the first and second sgRNAs are, separately or collectively, operably linked to an RNA polymerase Ill promoter, optionally a U6 promoter.

[0149] In some embodiments, the polynucleotide sequence encoding the CRISPR nuclease is operably linked to an EF-1a promoter or CMV promoter. In some embodiments, the polynucleotide sequence encoding the CRISPR nuclease is operably linked to a CaMKII promoter.

[0150] In some embodiments, the expression vector or expression vector system for use comprises a nucleotide sequence having at least 70, 75, 80, 85, 90, 91, 92, 93, 94, 95, 96, 97, 98, or 99% sequence identity to a sequence selected from SEQ ID NOs: 6 and 8-10. In some embodiments, the expression vector or expression vector comprises a nucleotide sequence comprising or consisting of a sequence selected from SEQ ID NOs: 6, 8-10, 56-62, 72-74, 81-86, 90-92, 96-98, 102-104, 108-110, 114-116, 120-122, 124-129, or 131-138. The expression vector encoding the dCas may comprise or consist of a nucleotide sequence SEQ ID NO: 12.

[0151] The elements encoding the sgRNA and CRISPR nuclease may be comprised by the same or different vectors. The elements encoding the crRNA, tracrRNA and the CRISPR nuclease may be comprised by the same or different vectors. The elements encoding the sgRNA for a first target human endogenous gene, the sgRNA for a second target human endogenous gene, and the CRISPR nuclease may be comprised by the same or different vectors. The elements encoding the sgRNA for a first target human endogenous gene and the sgRNA for a second target human endogenous gene may be comprised by the same vector, and the CRISPR nuclease may be comprised by a different vector. The elements encoding the crRNA for a first target human endogenous gene, crRNA for a second target human endogenous gene, tracrRNA, and the CRISPR nuclease may be comprised the same or different vectors. In such cases the promoter may be adapted to allow for the incorporation of the elements into a single vector, such as by modifying its size, e.g. making it smaller.

[0152] The promoter may be a neuronal activity-dependent promoter which is a promoter that alters or drives expression of a target gene in response to changes in neuronal activity in neural cells. Such changes in neuronal activity may result from a neural cell that becomes hyperexcited, for example during a seizure. In some preferred embodiments, the neuronal activity-dependent promoter is an immediate early gene (IEG) promoter. In other embodiments, the activity-dependent promoter is cFos, Egr1 (also known as Zif268), Arc, mArc, Homer1a, Bdnf, Creb, Srf, Mef2, Fosb, and Npas4 or synthetic activity-dependent promoters such as PRAM (Sorensen et al., eLife 2016) and ESARE (Kawashima et al., Nature Methods 2013 PMID: 23852453), or part of them or combinations of the above. In other embodiments, the activity-dependent promoter is PRAM (Promoter Robust Activity Marker) or parts of this synthetic promoter: NRAM (NPAS4 Robust Activity Marker) or FRAM (Fos Robust Activity Marker).

[0153] Expression of a gene product may be achieved via an expression system, such as an inducible expression system. Such expression systems are, in a general sense, known in the art, and may be appropriately selected by the skilled person in order to optimise expression of the intermediate gene or further gene. For example, the expression system may be an inducible expression system such as Tet-On. See e.g. Gaia Colasante et. al (Brain, Volume 143, Issue 3, March 2020, Pages 891-905, https://doi.org/10.1093/brain/awaa045), the contents of which is incorporated herein by reference in its entirety.

[0154] Of the currently available inducible gene expression systems, Tet-On is the most widely characterised. In some embodiments, in order to improve brain penetration and reduce side-effects in human subjects, the intermediate inducible gene expression system may be a “GeneSwitch™” system. “GeneSwitch™”, uses a chimeric protein, consisting of a truncated human progesterone receptor that does not respond to endogenous steroids, along with a Gal4 DNA binding domain and a P65 activation domain. The receptor is activated by mifepristone, which frees the complex from co-repressors and allows it to initiate transcription of the desired gene in the nucleus by binding to an upstream activating sequence (UAS).

[0155] The expression system can also comprise expression of a modified ecdysone receptor that regulates an optimized ecdysone responsive promoter. The expression systems can also be based on cumate-induced binding of the cumate repressor to the cumate operator, rapamycin-induced interaction between FKBP12 and FRAP, FKCsA-induced interaction between FKBP and cyclophilin, ABA induced interaction between PYL1 and AB11, and the “riboswitch” system. (Kallunki et al PMC6721553).

[0156] Expression vectors may be generated in the following exemplary protocols (as well as those provided in the Examples below) Small guide RNAs are cloned into a lentiviral vector with a U6 promoter (pU6). Defective Cas9 fused to the VP160 activator domain is cloned into T2A with the Puromucin resistance cassette (PuroR) and under the control of the Eef1a1 (Ef1alpha) promoter (Ef1alpha-dCas9VP160-T2APuroR). The dCas9VP160-2A-PuroR assette is obtained from pAC94-pmax-dCas9VP160-2A-PuroR (Addgene plasmid #48226), and subcloned in a the TetO-FUW vector followed by restriction digestion with Hpal/Afel, then blunt cloned into an Ef1alpha-GFP vector after GFP removal by Smal/EcoRV digestion. Ef1alpha-dCas9VP160-T2A-GFP is obtained by restriction digestion of Ef1alpha-dCas9VP160-T2APuro R with Ascl/Xbal, which removed VP160-T2A-PuroR; the VP160-T2A fragment is then obtained by Ascl/Xhol digestion from Ef1alpha-dCas9VP160-T2A-PuroR while the GFP fragment is PCR amplified using primers containing Xhol/Xbal restriction sites; the two fragments are then ligated together into the vector.

[0157] To obtain a single vector containing both dCas9A and sgRNA, the pU6-sgRNA cassette is Hpal digested and cloned into Ef1alpha-dCas9VP160. To generate an adeno-associated virus (AAV) with activating dCas9 (dCas9-VP64) under a doxycycline-inducible promoter, and tetracycline transactivator responsive element (TRE), AAV-SpCas9 is used as the starting material: the Mecp2 is removed by Xbal/Agel digestion and the TRE promoter was amplified using primers. SpCas9 is removed using Agel/EcoRI and Cas9m4-VP64 is digested with Agel/EcoRI. The VP64 fragment is PCR-amplified using primers. The AAV vector containing the sgRNA cassette is derived from pAAV-U6sgRNA(Sapl)_hSyn-GFP-KASH-bGH. The sgRNA or control are cloned under the U6 promoter and the GFP is removed by Kpnl/Clal digestion and replaced by a DIO-rtTA-T2A-Tomato cassette.

### Viral Vectors

[0158] A preferred expression vector for use with the present invention is a viral vector, such as a lentiviral or AAV vector.

[0159] In some instances, the vector is a recombinant AAV vector. AAV vectors are DNA viruses of relatively small size that can integrate, in a stable and site-specific manner, into the genome of the cells that they infect. They are able to infect a wide spectrum of cells without inducing significant effects on cellular growth, morphology or differentiation.

[0160] The AAV genome has been cloned, sequenced and characterized. It encompasses approximately 4700 bases and contains an inverted terminal repeat (ITR) region of approximately 145 bases at each end, which serves as an origin of replication for the virus. The remainder of the genome is divided into two essential regions that carry the encapsidation functions: the left-hand part of the genome, that contains the rep gene involved in viral replication and expression of the viral genes; and the right-hand part of the genome, that contains the cap gene encoding the capsid proteins of the virus.

[0161] AAV vectors may be prepared using standard methods in the art. Adeno-associated viruses of any serotype are suitable (see, e.g., Blacklow, pp. 165-174 of “Parvoviruses and Human Disease” J. R. Pattison, ed. (1988); Rose, Comprehensive Virology 3:1, 1974; P. Tattersall “The Evolution of Parvovirus Taxonomy” in Parvoviruses (J R Kerr, S F Cotmore. M E Bloom, R M Linden, C R Parrish, Eds.) p5-1⁴, Hudder Arnold, London, U K (2006); and D E Bowles, J E Rabinowitz, R J Samulski “The Genus Dependovirus” (J R Kerr, S F Cotmore. M E Bloom, R M Linden, C R Parrish, Eds.) p15-23, Hudder Arnold, London, UK (2006), the disclosures of which are hereby incorporated by reference herein in their entireties). Methods for purifying for vectors may be found in, for example, U.S. Pat. Nos. 6,566,118, 6,989,264, and 6995006 and International Patent Application Publication No.: WO/1 999/011764 titled “Methods for Generating High Titer Helper-free Preparation of Recombinant AAV Vectors”, the disclosures of which are herein incorporated by reference in their entirety.

[0162] Preparation of hybrid vectors is described in, for example, PCT Application No. PCT/US2005/027091. The use of vectors derived from the AAVs for transferring genes in vitro and in vivo has been described (See e.g., International Patent Application Publication Nos: WO 1/18088 and WO 93/09239; U.S. Pat. Nos. 4,797,368, 6,596,535, and 5,139,941; and European Patent No: 0488528). These publications describe various AAV-derived constructs in which the rep and/or cap genes are deleted and replaced by a gene of interest, and the use of these constructs for transferring the gene of interest in vitro (into cultured cells) or in viva (directly into an organism). The replication defective recombinant AAVs according to the invention can be prepared by co-transfecting a plasmid containing the nucleic acid sequence of interest flanked by two AAV inverted terminal repeat (ITR) regions, and a plasmid carrying the AAV encapsidation genes (rep and cap genes), into a cell line that is infected with a human helper virus (for example an adenovirus). The AAV recombinants that are produced are then purified by standard techniques.

[0163] In some instances, useful AAV vectors for the expression constructs as described herein include those encapsidated into a virus particle (e.g. AAV virus particle including, but not limited to, AAV1, AAV2, AAV3, AAV4, AAV5, AAV6, AAV7, AAV8, AAV9, AAV10, AAV11, AAV12, AAV13, AAV14, AAV15, AAV16 and AAVrh10). Accordingly, the instant disclosure includes a recombinant virus particle (recombinant because it contains a recombinant polynucleotide) comprising any of the vectors described herein.

[0164] In some embodiments, the viral vector contains a sequence encoding a reporter protein, such as a fluorescent protein. In other embodiments the viral vector lacks a sequence encoding a reporter protein, such as a fluorescent protein.

[0165] In some embodiments, the viral vector additionally comprises genes encoding viral packaging and envelope proteins.

[0166] In some embodiments, the viral vector is a lentiviral vector. In some embodiments, the lentiviral vector is a non-integrating lentiviral vector (NILV). Vector particles produced from these vectors do not integrate their viral genome into the genome of the cells and therefore are useful in applications where transient expression is required or for sustained episomal expression such as in quiescent cells. NILVs can be developed by mutations in the integrase enzyme or by altering the 5′ LTR and/or the 3′ LTR to prevent integrase from attaching these sequences. These modifications eliminate integrase activity without affecting reverse transcription and transport of the pre-integration complex to the nucleus. Without wishing to be bound by any particular theory, when a NILV enters a cell the lentiviral DNA is expected to remain as remains in the nucleus as an episome, leading to sustained expression in non-dividing cells (post-mitotic cells) such as neurons.

[0167] In some embodiments, the vector further comprises an AmpR gene, and/or a hGh poly(A) signal gene, and/or one or more origin of replication genes.

[0168] In some embodiments, the viral vector comprises a nucleotide sequence having at least 70, 75, 80, 85, 90, 91, 92, 93, 94, 95, 96, 97, 98 or 99% identity to the nucleotide sequence of SEQ ID NO: 6 and 8-10. In some embodiments, the viral vector is the nucleotide sequence of SEQ ID NO: 6 and 8-10. In some embodiments, the viral vector comprises a nucleotide sequence having at least 70, 75, 80, 85, 90, 91, 92, 93, 94, 95, 96, 97, 98 or 99% identity to the nucleotide sequence of SEQ ID NO: 6, 8-10, 56-62, 72-74, 81-86, 90-92, 96-98, 102-104, 108-110, 114-116, 120-122, 124-129, or 131-138. In some embodiments, the viral vector is the nucleotide sequence of SEQ ID NO: 6, 8-10, 56-62, 72-74, 81-86, 90-92, 96-98, 102-104, 108-110, 114-116, 120-122, 124-129, or 131-138.

### Viral Particles

[0169] The invention also includes in vitro methods of making viral particles, such as lentiviral particles or adeno-associated viral particles. In one embodiment, this method involves transducing mammalian cells with a viral vector or expression vector or expression vector system as described herein and expressing viral packaging and envelope proteins necessary for particle formation in the cells and culturing the transduced cells in a culture medium, such that the cells produce viral particles that are released into the medium. An example of a suitable mammalian cell is a human embryonic kidney (HEK) 293 cell.

[0170] It is possible to use a single expression vector that encodes all the viral components required for viral particle formation and function. Most often, however, multiple plasmid expression vectors or individual expression cassettes integrated stably into a host cell are utilised to separate the various genetic components that generate the viral vector particles.

[0171] In some embodiments, expression cassettes encoding the one or more viral packaging and envelope proteins have been integrated stably into a mammalian cell. In these embodiments, transducing these cells with a viral vector described herein is sufficient to result in the production of viral particles without the addition of further expression vectors.

[0172] In other embodiments, the in vitro methods involve using multiple expression vectors. In some embodiments, the method comprises transducing the mammalian cells with one or more expression vectors encoding the viral packaging and envelope proteins that encode the viral packaging and envelope proteins necessary for particle formation.

[0173] Examples of suitable viral packaging and envelope proteins and expression vectors encoding these proteins are commercially available and well known in the art. In general, the viral packaging expression vector or expression cassette expresses the gag, pol, rev, and tat gene regions of HIV-1 which encode proteins required for vector particle formation and vector processing. In general, the viral envelope expression vector or expression cassette expresses an envelope protein such as VSV-G. In some cases, the packaging proteins are provided on two separate vectors —one encoding Rev and one encoding Gag and Pol. Examples of lentiviral vectors along with their associated packaging and envelope vectors include those of Dull, T. et al., “A Third-generation lentivirus vector with a conditional packaging system” J. Virol 72(11):8463-71 (1998).

[0174] The ssDNA AAV genome contains two open reading frames, Rep and Cap, flanked by two 145 base inverted terminal repeats (ITRs) fundamental for the synthesis of the complementary DNA strand. Rep and Cap produce multiple proteins (Rep78, Rep68, Rep52, Rep40, which are required for the AAV life cycle; and VP1, VP2, VP3, which are capsid proteins). The transgene will be inserted between the ITRs and Rep and Cap in trans. An AAV2 backbone is commonly used and is described in Srivastava et al., J. Virol., 45: 555-564 (1983). Cis-acting sequences directing viral DNA replication (ori), packaging (pkg) and host cell chromosome integration (int) are contained within the ITRs. AAVs also require a helper plasmid containing genes from adenovirus. These genes (E4, E2a and VA) mediate AAV replication. An example of a pAAV plasmid is available from Addgene (Cambridge, MA, USA) as plasmid number 112865 or 60958.

[0175] Following release of viral particles, the culture medium comprising the viral particles may be collected and, optionally the viral particles may be separated from the culture medium. Optionally, the viral particles may be concentrated.

[0176] Following production and optional concentration, the viral particles may be stored, for example by freezing at −80° C. ready for use by administering to a cell and/or use in therapy.

[0177] The invention also provides viral particles, for example those produced by the methods described herein. As used herein, a viral particle comprises a DNA or RNA genome packaged within the viral envelope that is capable of infecting a cell, e.g. a mammalian cell. A viral particle may be integrase deficient, e.g. it may contain a mutant integrase enzyme or contain alterations in the 5′ and/or 3′ LTRs as described herein.

[0178] Virus particles may be prepared as follows: Lentiviruses are produced as previously described with a titre of 10⁷-10⁸ IU/ml (Colasante et al., 2015). AAVs are produced as previously described with a titre 41012 vg/ml (Morabito et al., 2017). The TRE-dCas9-VP64 AAV may be produced by VectorBuilder with a titre of 8×1012 vg/ml.

[0179] Virus particles may be transfected into target cells as follows: P19 cells are cultured in alpha-MEM (Sigma-Aldrich) supplemented foetal bovine serum non-essential amino acids, sodium pyruvate, glutamine and penicillin/streptomycin and split every 2-3 days using 0.25% trypsin. For transfection, Lipofectamine™ 3000 (Thermo Fisher Scientific) is used according to the manufacturer's instructions.

[0180] Virus particles may also be transfected into target cells as follows: cortical neurons are isolated from postnatal Day 0 C57BI/6J mouse pups as previously described (Beaudoin et al., 2012) and transduced with lentiviruses at 1 day in vitro (DIV). Quantitative RT-PCR, RNA seq, western blot analysis and electrophysiology recordings may be performed 14-16 days after transduction.

### Neurological Diseases and Disorders

[0181] One aspect the invention provides targeting RNA, crRNA, guide RNA systems, sgRNA, expression vectors and expression vector systems for use in a method of treatment of a neurological disease or disorder in a subject. In certain aspects, the invention also provides the use of the inventive products as described herein for the manufacture of a medicament for the treatment of said neurological diseases or disorders of a subject. The invention also provides methods of treatment of said neurological diseases and disorders which comprise administering the inventive products described herein to an individual in need thereof.

[0182] In preferred cases, the subject is a human subject. The subject may also be an animal such as a mouse or a rat.

[0183] The disorder may be associated with neuronal hyperexcitability in a subject. Said methods of treatment may be prophylactic.

[0184] The neurological disorders as described herein may be associated with neuronal hyperexcitability. As used herein, “hyperexcitability” is a characteristic feature of epilepsy in which the likelihood that neural networks become hypersynchronized, with excessive neuronal firing, is increased. The underlying mechanisms are incompletely understood and may include loss of inhibitory neurons, such as GABAergic interneurons, that would normally balance out the excitability of other neurons, or changes in the intrinsic properties of excitatory neurons that make them more likely to fire abnormally. Among other possible mechanisms are that the levels of GABA and the sensitivity of GABAA receptors to the neurotransmitter may decrease, resulting in less inhibition.

[0185] The neurological disorders as described herein may also be associated with haploinsufficiency, and methods may rescue haploinsufficiency in a subject.

[0186] Non-limiting examples of neurological disorders associated with neuronal hyperexcitability include seizure disorders (such as epilepsy), Alzheimer's disease, multiple sclerosis, Parkinson's disease, tremor and other movement disorders, chronic pain, migraine, major depression, bipolar disorder, anxiety, and schizophrenia. In particularly preferred embodiments, the treatment is for epilepsy, for example idiopathic, symptomatic, and cryptogenic epilepsy.

[0187] In particularly preferred embodiments, the epilepsy is neocortical epilepsy or temporal lobe epilepsy, especially if it is resistant to drugs used at therapeutic concentrations (pharmacoresistant or refractory epilepsy). In some embodiments, the epilepsy is acquired focal epilepsy.

[0188] In some particularly preferred embodiments, KCNQ2 and KCNQ3, LGI1 and KCNA1, and combinations thereof, are useful in treating epilepsy. In some particularly preferred embodiments, KCNA1 and KCNJ2, KCNQ2 and KCNQ3, and combinations thereof, are useful in treating pain, such as chronic neuropathic pain or primary cephalalgia.

[0189] In some preferred embodiments, the neurological disorder is a disorder characterized by episodes of abnormal cellular activity, such as migraine, cluster headache, trigeminal neuralgia, post-herpetic neuralgia, paroxysmal movement disorders, uni- or bipolar affective disorders, anxiety and phobias. In some such disorders (migraine in particular), the abnormal activity may result in neuronal depolarization and electrical silence known as cortical spreading depolarization or cortical spreading depression, and this phenomenon has been implicated in sudden unexpected death in epilepsy (SUDEP).

[0190] The treatments described herein may be used to quench or block epileptic activity. The treatments may be used to reduce the frequency of seizures.

[0191] In some embodiments, the vector does not affect spontaneous locomotion or memory in a subject, optionally wherein spontaneous locomotion or memory is measured using an open field test, object localisation test, or T maze test.

[0192] In some embodiments, the expression vectors are only locally active in the seizure focus of the brain of a subject. In some cases, the expression vectors are only locally active in neurons capable of driving a seizure and/generating sustained firing. In some cases, the expression vectors are only locally active in over-depolarised neurons. In such cases, expression of the sgRNA and/or CRISPR nuclease may be controlled by an activity-dependent promoter.

[0193] In some embodiments, the vector or vector system can cause a reduction in the spike frequency of a neuron of the subject by more than 75%. The reduction in the spike frequency of the neuron can be measured using multi-electrode arrays on or after 21 DIV (days in vitro). The reduction in the spike frequency may also be measured using calcium imaging or extracellular field potential recordings on or after 21 DIV. The reduction in the spike frequency of the neuron is measured relative to a control vector. In some cases, the neuron is a primary cortical neuron.

[0194] In some embodiments, the vector or vector system can cause fewer than 10 action potentials per second, or fewer than 5 action potentials per second, or fewer than 4 action potentials per second, or fewer than 3 action potentials per second, or fewer than 2 action potentials per second, or no action potentials per second, in a neuron. In some embodiments, the vector or vector system can cause a greater than 50%, greater that 55%, greater that 60%, greater that 65%, greater that 70%, greater that 75%, greater that 80%, greater that 85%, greater that 90%, greater that 95%, or 100% reduction in action potentials per second. The number of action potentials may be measured using ex vivo acute hippocampal slice electrophysiology.

[0195] In some embodiments, the vector or vector system can cause a resting membrane potential in a neuron of less than −50 mV, or less than −60 mV, or less than −70 mV, or less than −80 mV, or less than −90 mV, or less than −100 mV. In some embodiments, the vector or vector system can increase the threshold for action potentials in a neuron to more than 50 pA, or more than 75 pA, or more than 100 pA, or more than 150 pA, or more than 200 pA, or more than 250 pA, or more than 300 pA, or more than 350 pA, or more than 400 pA, or more than 450 pA, or more than 500 pA, or more than 550 pA, or more than 600 pA, or more than 700 pA, or more than 800 pA, or more than 900 pA, or more than 1000 pA, wherein the threshold is the sum of current threshold and holding current.

[0196] In some embodiments, the vector or vector system can cause less than 5 spikes/second in a primary neuronal culture grown on multi-electrode arrays (MEAs), as described in the examples. Spike is defined as aggregate neuronal activity. In some embodiments, the vector or vector system can cause less than 10, or less than 5 bursts/minute in a primary neuronal culture grown on MEAs, as described in the examples. In some embodiments, the vector or vector system can cause burst durations of less than 200 msec in a primary neuronal culture grown on MEAs, as described in the examples. In some embodiments, the vector or vector system can cause a mean number of spikes per burst of less than 20, or less than 15 in a primary neuronal culture grown on MEAs, as described in the examples.

[0197] In some embodiments, the number of action potentials, resting membrane potential, or threshold for action potentials is measured in an acute hippocampal slice from a subject. In some embodiments, the number of action potentials, resting membrane potential, or threshold for action potentials is measured using acute hippocampal slice electrophysiology and/or patch clamp electrophysiology.

[0198] In some cases, the vector or vector system can cause a change as described above, that is improved relative to a reference sequence comprising SEQ ID NO: 4, 11, 47, 48, 123 or 130. In some cases, the vector or vector system can cause a change as described above, that is improved relative to a reference sequence comprising any of SEQ ID NO: 1-138.

[0199] To determine efficacy of treatment in model systems, the following exemplary protocols may be used.

[0200] Slice preparation: Camk2a-Cre mice of either sex (2-3 months old) are sacrificed by cervical dislocation under isoflurane. Brains are quickly dissected into ice-cold oxygenated slicing solution (in mM: 75 sucrose, 2.5 KCl, 25 NaHCO3, 25 glucose, 7 MgCl2, 0.5 CaCl2) and cut into 300 mm coronal slices using a Leica VT1200S vibratome (Leica). Slices are stored submerged in oxygenated recording artificial CSF (in mM: 25 glucose, 125 NaCl, 2.5 KCl, 25 NaHCO3, 1 MgCl2, 1.25 NaH2PO4.H2O and 2 CaCl2) at 32C for 30 min and at room temperature for a further 30 min before recording.

[0201] Electrophysiology (In vitro): For current-clamp recordings, the internal solution contains (in mM): 126 K-gluconate, 4 NaCl, 1 MgSO4, 0.02 CaCl2, 0.1 BAPTA, 15 glucose, 5 HEPES, 3 ATP-Na2, 0.1 GTP-Na, pH 7.3. The extracellular (bath) solution contains (in mM): 2 CaCl2, 140 NaCl, 1 MgCl2, 10 HEPES, 4 KCl, 10 glucose, pH 7.3. D-(−)-2-amino-5-phosphonopentanoic acid (D-AP5; 50 IM), 6-cyano-7-nitroquinoxaline-2,3-dione (CNQX; 10 IM) and picrotoxin (PTX; 30 IM) are added to block synaptic transmission. Transduced excitatory neurons are identified with EGFP fluorescence and from a pyramidal somatic shape. Neurons with unstable resting potential (or 4-50 mV), access resistance (Ra) 415 MX and/or holding current 4200 pA at −70 mV are discarded. Bridge balance compensation is applied and the resting membrane potential is held at −70 mV. A current step protocol is used to evoke action potentials by injecting 250-ms long depolarizing current steps of increasing amplitude from −20 pA (D10 pA). Recordings are acquired using a MultiClamp™ 700A amplifier (Axon Instruments, Molecular Devices) and a Power3 1401 (CED) interface combined with Signal software (CED), filtered at 10 kHz and digitized at 50 kHz.

[0202] Electrophysiology (Ex vivo current clamp recordings): Current clamp recordings are performed in standard external solution in the presence of DL-AP5 (50 IM), CNQX (10 IM) and PTX (30 IM) to block NMDA, AMPA/kainate, and GABAA receptors, respectively. The internal solution is the same as for in vitro patch clamp recordings. Neurons with holding current 4100 pA and Ra 420 MX upon whole-cell breakin in voltage clamp mode and membrane potential less negative than −60 mV in current clamp are not considered for analysis. A 1440 DigidataVR (Molecular Devices) or Power3 1401 (CED) interface and MultiClamp™ 700A (Molecular Devices) amplifier is used.

[0203] Electrophysiology (In vitro and ex vivo electrophysiology analysis): Electrophysiology analysis is performed with an automated Python script. Passive properties are calculated from the hyperpolarizing steps of the current clamp steps protocol. Input resistance is averaged from three current steps (two negative and one positive). Capacitance is calculated from the hyperpolarizing current step as follows. First, the input resistance is determined as the steady state DV/DI (voltage/current), then the cell time constant (tau) is obtained by fitting the voltage relaxation between the baseline and the hyperpolarizing plateau. Capacitance is then calculated as tau/resistance. Single action potential parameters are calculated as previously described (Pozzi et al., 2013). An event is detected as an action potential if it crossed 0 mV and if the rising slope was 420 mV/ms in a range of injected currents from 0 pA to 500 pA. The experiments are performed at room temperature (22-24° C.). All recordings and analyses are carried out blind to vector transduced.

[0204] Electrophysiology (Activity clamp): The template simulating the barrage of synaptic conductances during epileptiform bursts is previously described (Morris et al., 2017). Dynamic clamp software (Signal 6.0, Cambridge Electronic Design, Cambridge, UK) and a Power3 1401 (CED) are used to inject both excitatory and inhibitory conductance templates simultaneously in a neuron recorded in current clamp configuration (iteration frequency 15 kHz). Erev is set to 0 mV and −75 mV for excitatory and inhibitory conductances, respectively, and corrected for a liquid junction potential of 14.9 mV. Incrementing synaptic conductances are injected in recorded neurons to establish the conductance threshold for action potential generation. Current clamp recordings for activity clamp are performed with the same external and internal solutions as given above.

[0205] Surgical procedures: Surgical procedures are performed in anaesthetized adult mice (2-3 months) placed in a stereotaxic frame (Kopf).

[0206] Surgical procedures (Epilepsy model): Kainic acid (0.3 mg of 10 mg/ml, Tocris) is injected in a volume of 200 nl (7.14 mM effective concentration) in the right amygdala (antero-posterior: −0.94; medio-lateral: 2.85; dorsoventral: 3.75) at 200 nl/min under isoflurane anaesthesia (surgery time 10-15 min). The mice are allowed to recover from anaesthesia at 32° C. for 5 min and then moved back to their cage where they are monitored closely during status epilepticus.

[0207] Status epilepticus (characterized by stage 5 seizures on the Racine scale) usually begin 10-15 min after complete recovery and end 40 min after kainic acid injection with 10 mg/kg intraperitoneal diazepam. Only animals that exhibit at least one seizure per week are included in the subsequent study.

[0208] Surgical procedures (Stereotaxic viral injection): AAV9 viruses (300 nl, 1:1 ratio) are injected with a 5-ml Hamilton syringe (33-Gauge) at 100 nl/min in three different coordinates of the right ventral hippocampus (Paxinos Mouse Brain Atlas; antero-posterior: −2/3 bregma/lambda distance; medio-lateral: −3; dorso-ventral: 3.5/3/2.5). The needle is kept in place for 10 min after each injection.

[0209] Surgical procedures (Transmitter implantation): An electrocorticogram (ECoG) transmitter (A3028C-CC Open Source Instruments, Inc.) is subcutaneously implanted and the recording electrode is placed in the cortex above the viral injection site (antero-posterior: −2/3 bregma/lamda distance; medio-lateral: −3). The ground electrode is placed in the contralateral frontal hemisphere.

[0210] Surgical procedures (Doxycycline diet): Animal food is changed to doxycycline ad libitum pellet (TD.120769-BLUE 625 mg/kg) after baseline recordings for the following 2 weeks.

[0211] Surgical procedures (Exclusion criteria): Animals recorded for the entire period of the experiment (6 weeks after kainic acid) are used in the analysis. At the end of the experiments some animal tissues are analysed with qRT-PCR and others were verified with immunofluorescence. Some mice injected with kainic acid are excluded because of infections or unexpected death in the first few days before planned implantation. To avoid possible bias, exclusions are made while researchers are blinded to treatment.

[0212] Surgical procedures (Pilocarpine acute seizure model): Male wild-type C57BLC/6J mice (3 months old) are anaesthetized with isoflurane and placed in a stereotaxic frame (David Kopf Instruments Ltd.). The animals are injected with 1.5 μl AAV CaMKII—CRISPR-Kcna1 or CaMKII—CRISPR-LacZ at 100 nl/min in layer 2/3-5 primary visual cortex (coordinates: antero-posterior −2.8 mm, medio-lateral 2.4 from the bregma, and dorso-ventral 0.7/0.5/0.3 from pia). For ECoG monitoring, the recording electrode of 256 Hz single-channel ECoG transmitter (A3028C-CC, Open Source Instruments Inc.) is placed at the same coordinates. A reference electrode is placed in the contralateral skull. A cannula (Bilaney Consultants Ltd.) is implanted in the same location as the recording electrode for sequential pilocarpine injections. Animals are allowed to recover for 2 weeks before induction of acute seizures by pilocarpine (3.5 M in saline) (Magloire et al., 2019) injected 0.5 mm below the cannula using a microinjection pump (WPI Ltd.), a 5-ml Hamilton syringe (Esslab Ltd.), and a 33-Gauge needle (Esslab Ltd.). The injection volume is incremented on consecutive days (180 nl, 300 nl and 500 nl) until spike-wave discharges are observed, and recorded as the threshold dose. If seizures fail to terminate spontaneously, the animal is excluded from the study. To assess the treatment, the animals are placed on a doxycycline diet for 7 days and only the threshold dose for the animal is repeated. ECoG monitoring is used to assess seizure severity for an hour after the pilocarpine injection. The researcher who acquired and analysed the data is blinded to the virus injected. EEG (or ECoG) recordings: The ECoG is acquired wirelessly using hardware and software from Open Source Instruments, Inc. The ECoG is sampled at a frequency of 256 Hz, band-pass filtered between 1 and 160 Hz, and recorded continuously for the duration of the experiments. The animals are housed independently in a Faraday cage.

[0213] EEG analysis: Spontaneous seizures are detected from chronic recordings using a semi-automated supervised learning approach. First, a library containing examples of epileptiform activity is built using seizures identified from visual inspection of ECoG data. The recordings are saved in hour-long files, and for each seizure this full hour is included in the library. Recordings are chunked into 5-s blocks that are labelled as either ‘ictal’ or ‘interictal’ if they contained epileptiform-labelled activity or not, respectively. For each 5-s chunk of recording, 15 features are extracted. A random forest discriminative classifier is trained on the features and labels of each of the 5-s examples in the library (Breiman, 2001). In addition, cross-validation generated classifier predictions are used to parameterize a Hidden Markov Model in which the hidden states were the human annotations and the emissions the classifier predictions. For automated detection of epileptiform activity from unlabelled recordings, the discriminative classifier is first used to predict the class of consecutive 5-s chunks. The forward-backward algorithm is then applied to obtain the marginal probability of being in seizure state for each recording chunk given the surrounding classifier predictions.

[0214] The smoothed predictions are then manually verified, false positives removed from the analysis and start and end locations adjusted. To quantify the performance this approach, four 2-week sets of recordings are randomly selected and visually examined for seizures and compared to classifier predictions (blinded).

[0215] Video recordings: IP cameras from Microseven (https://www.microseven.com/index.html) are used and synchronized via the Windows time server to the same machine as used to acquire the ECoG. Continuous video recordings produce six videos per hour.

[0216] Immunohistochemistry: Immunostaining is performed on 50-mm mouse brain PFAfixed sections with the following antibodies: mouse anti-GAD67 (MAB5406, Merck), rabbit anti-RFP (600-401-379, Rockland), Alexa FluorVR 555 goat anti-rabbit (A32732, Invitrogen) and Alexa FluorVR 488 goat anti-mouse (A32723, Invitrogen). Images are acquired with ZEN software (Zeiss) on a LSM710 confocal microscope (Zeiss) and co-localization analysis of tdTomato and GAD67 is performed with ImageJ 1.51 n (Wayne Rasband, National Institute of Health) plugin ‘JACoP’.

[0217] Behaviour tests: Trials started 2 weeks post-virus injection, are carried out between 7 am and 7 pm, during the light phase. Animals (3 months old) are habituated in the designated behaviour room for at least 15 min in home cages prior to the test.

[0218] Object Location Test: For the familiarization phase, mice are placed individually in the arena (50 cm_50 cm_40 cm) and for 8 min, and allowed to explore two identical objects placed in the arena at least 5 cm away from the border. After a 6-h retention delay, the animals are returned to the same arena with one of the objects randomly relocated to a new location. The animal is allowed to explore for 8 min with video recordings. The arena and objects are thoroughly cleaned with ethanol between each session. Novel Object Recognition Test: Twenty-four hours after the Object Location Test, the same animals are subjected to the Novel Object Recognition Test. The familiarization session is the same as for the Object Location Test. After a 6-h retention delay, one of the objects was randomly replaced by a novel object with a different shape and surface texture. The animals are allowed to explore freely for 8 min (Leger et al., 2013). All trials are recorded with a Raspberry Pi 3B+equipped with a V1 camera module (https://www.raspberrypi.org/documentation/hardware/camera/) and using Raspivid version 1.3.12 as 1296_972 pixel, 30 frame/s MP4 video files. Automated analysis is carried out with custom scripts written in Bonsai version 2.4-preview (Lopes et al., 2015). A researcher is blinded to the treatment assessed and scores the exploration time manually after automated analysis. Discrimination index (DI) is calculated using the following formula: (time spent with altered object-time spent with unchanged object)/(total time spent exploring objects).

[0219] Statistical analysis: Data are plotted as box and whiskers, representing interquartile range (box), median (horizontal line), and maximum and minimum (whiskers), together with all the points. The mean is further shown as a plus symbol. The statistical analysis performed is shown in each figure legend. Deviation from normal distributions was assessed using D'Agostino-Pearson's test, and the Ftest is was used to compare variances between two sample groups. Student's two-tailed t-test (parametric) or the Mann-Whitney test (non-parametric) are used as appropriate to compare means and medians. Fisher's exact test is used to analyse the contingency table. To compare two groups at different time points two-way repeated measure ANOVA is used, followed by Bonferroni post hoc test for functional analysis. Statistical analysis is carried out using Prism (GraphPad Software, Inc., CA, USA) and SPSS (IBM SPSS statistics, NY, USA).

[0220] Data availability: The Python and Bonsai scripts are made freely available. Plasmids are deposited with Addgene, and transcriptomic data are deposited in the NCBI Gene Expression Omnibus repository.

### Administration and Dosage

[0221] The inventive products described herein can be delivered to the subject in a variety of ways disclosed below, such as direct injection into the brain. For example, the treatment may involve direct injection of the viral particles into the cerebral cortex, in particular the neocortex or hippocampal formation. Another site of injection is an area of cortical malformation or hamartoma suspected of generating seizures, as occurs in focal cortical dysplasia or tuberous sclerosis. The treatment may involve direct injection of the viral particles into the location in the brain where it is believed to be functionally associated with the disorder. For example, where the treatment is for myoclonic epilepsy this may involve direct injection of the viral particles into the motor cortex; where the treatment is for chronic or episodic pain, this may involve direct injection of the viral particles into the dorsal root ganglia, trigeminal ganglia or sphenopalatine ganglia; and where the treatment is for Parkinson's disease, this may involve direct injection of the viral particles into the substantia nigra, subthalamic nucleus, globus pallidus or putamen. The particular method and site of administration would be at the discretion of the physician who would also select administration techniques using his/her common general knowledge and those techniques known to a skilled practitioner.

[0222] In some embodiments, the therapy can be delivered via a direct injection into the hippocampal region and in the first instance can be trialled by on patients that are scheduled to undergo surgery thereby reducing the risk of this approach.

[0223] The invention may also be used to treat multiple epileptic foci simultaneously by injection directly into the multiple identified loci.

[0224] The treated neural cell may be a neuron or a glial cell. In particularly preferred embodiments, the neural cell is a neuron. In some embodiments, the neuron is a cortical neuron.

[0225] The patient may be one who has been diagnosed as having drug-resistant or medically-refractory epilepsy, by which is meant that epileptic seizures continue despite adequate administration of antiepileptic drugs.

[0226] The subject may be one who has been diagnosed as having well defined focal epilepsy affecting a single area of the neocortex of the brain. Focal epilepsy can arise, for example, from developmental abnormalities or following strokes, tumours, penetrating brain injuries or infections.

[0227] Following administration of the viral particles, the recipient individual may exhibit reduction in symptoms of the disease or disorder being treated. For example, for an individual being treated who has a seizure disorder such as epilepsy, the recipient individual may exhibit a reduction in the frequency or severity of seizures. This may have a beneficial effect on the disease condition in the individual.

[0228] The term “treatment,” as used herein in the context of treating a condition, pertains generally to treatment and therapy of a human, in which some desired therapeutic effect is achieved, for example, the inhibition of the progress of the condition, and includes a reduction in the rate of progress, a halt in the rate of progress, regression of the condition, amelioration of the condition, and cure of the condition. Treatment as a prophylactic measure (i.e., prophylaxis, prevention) is also included.

[0229] The viral particles, vectors and other products disclosed herein can be delivered in a therapeutically-effective amount.

[0230] The term “therapeutically-effective amount” as used herein, pertains to that amount of the viral particles which is effective for producing some desired therapeutic effect, commensurate with a reasonable benefit/risk ratio, when administered in accordance with a desired treatment regimen.

[0231] Similarly, the term “prophylactically effective amount,” as used herein pertains to that amount of the viral particle which is effective for producing some desired prophylactic effect, commensurate with a reasonable benefit/risk ratio, when administered in accordance with a desired treatment regimen.

[0232] “Prophylaxis” in the context of the present specification should not be understood to describe complete success i.e. complete protection or complete prevention. Rather prophylaxis in the present context refers to a measure which is administered in advance of detection of a symptomatic condition with the aim of preserving health by helping to delay, mitigate or avoid that particular condition.

[0233] While it is possible for the vectors to be used (e.g., administered) alone, it is often preferable to present it as a composition or formulation e.g. with a pharmaceutically acceptable carrier or diluent.

[0234] The term “pharmaceutically acceptable,” as used herein, pertains to compounds, ingredients, materials, compositions, dosage forms, etc., which are, within the scope of sound medical judgment, suitable for use in contact with the tissues of the subject in question (e.g., human) without excessive toxicity, irritation, allergic response, or other problem or complication, commensurate with a reasonable benefit/risk ratio. Each carrier, diluent, excipient, etc. must also be “acceptable” in the sense of being compatible with the other ingredients of the formulation.

[0235] In some embodiments, the composition is a pharmaceutical composition (e.g., formulation, preparation, medicament) comprising, or consisting essentially of, or consisting of as a sole active ingredient, viral particle as described herein, and a pharmaceutically acceptable carrier, diluent, or excipient.

[0236] As described in WO2008096268, in gene therapy embodiments employing delivery of the viral particle, the unit dose may be calculated in terms of the dose of viral particles being administered. Viral doses include a particular number of virus particles or plaque forming units (pfu). For embodiments involving adenovirus, particular unit doses include 10³, 10⁴, 10⁵, 10⁶, 10⁷, 10⁸, 10⁹, 10¹⁰, 10¹¹, 10¹², 10¹³ or 10¹⁴ pfu. Particle doses may be somewhat higher (10 to 100 fold) due to the presence of infection-defective particles.

[0237] In some embodiments the methods or treatments of the present invention may be combined with other therapies, whether symptomatic or disease modifying.

[0238] The term “treatment” includes combination treatments and therapies, in which two or more treatments or therapies are combined, for example, sequentially or simultaneously.

[0239] For example it may be beneficial to combine treatment with a compound as described herein with one or more other (e.g., 1, 2, 3, 4) agents or therapies.

[0240] Appropriate examples of co-therapeutics will be known to those skilled in the art on the basis of the disclosure herein. Typically the co-therapeutic may be any known in the art which it is believed may give therapeutic effect in treating the diseases described herein, subject to the diagnosis of the individual being treated. For example epilepsy can sometimes be ameliorated by directly treating the underlying etiology, but anticonvulsant drugs, such as phenytoin, gabapentin, lamotrigine, levetiracetam, carbamazepine, clobazam, topiramate, and others, which suppress the abnormal electrical discharges and seizures, are the mainstay of conventional treatment (Rho & Sankar, 1999, Epilepsia 40: 1471-1483).

[0241] The particular combination would be at the discretion of the physician who would also select dosages using his/her common general knowledge and dosing regimens known to a skilled practitioner.

[0242] The agents (i.e. viral particle, plus one or more other agents) may be administered simultaneously or sequentially, and may be administered in individually varying dose schedules and via different routes. For example, when administered sequentially, the agents can be administered at closely spaced intervals (e.g., over a period of 5-10 minutes) or at longer intervals (e.g., 1, 2, 3, 4 or more hours apart, or even longer periods apart where required), the precise dosage regimen being commensurate with the properties of the therapeutic agent(s).

### Cells

[0243] The invention also provides a cell comprising the vectors described herein. In some embodiments, this cell is a mammalian cell such as a human cell. In some embodiments, the cell is a human embryonic kidney cell (HEK) 293.

[0244] In some embodiments, the cell is derived from a neuroblastoma cell-line.

### Kits

[0245] The invention also provides kits that comprise an expression vector or expression vector system as described herein and one or more viral packaging and envelope expression vectors also described herein. In some embodiments the viral packaging expression vector is an integrase-deficient viral packaging expression vector.

### Methods of Determining Expression of Genes

[0246] The invention also provides methods of determining the expression of a first and/or second endogenous human gene as disclosed herein. One such method comprises:
[0247] (i) transducing a cell with an expression vector or expression vector system of any one of the above claims or administering a viral particle of any one of the above claims to a cell under conditions that permit expression of the first human gene and/or second gene;
[0248] (ii) measuring the amount of the expression product of the first human gene and/or second gene, and comparing it to the amount of the expression product of the first human gene and/or second gene in a cell not transduced with expression vector, expression vector system or viral particle.

[0249] Measurement of expression could be determined by hybridisation assay or any other technique known in the art. This method can be carried out in vitro or ex vivo, for example in cell culture or in cells explanted from a human or animal body. Alternatively, the method can be carried out in vivo, for example where the viral particles are administered to a cell in a human or animal subject before extracting the cells or tissues from the human or animal subject in order to detect the expression of the genes.

[0250] Hybridisation assays are known in the art and generally involve using complementary nucleic acid probes (such as in situ hybridization using labelled probe, Northern blot and related techniques). In some embodiments, the hybridisation assay is an in situ hybridisation assay using a labelled probe, such as a fluorescently labelled probe.

[0251] As used herein, the term “probe” refers to a nucleic acid used to detect a complementary nucleic acid. Typically the probe is an RNA probe.

[0252] Suitable selective hybridisation conditions for oligonucleotides of 17 to 30 bases include hybridization overnight at 42° C. in 6×SSC and washing in 6×SSC at a series of increasing temperatures from 42° C. to 65 0C. One common formula for calculating the stringency conditions required to achieve hybridization between nucleic acid molecules of a specified sequence homology is (Sambrook et al., 1989): Tm=81.5° C. +16.6 Log [Na+]+0.41 (% G+C)−0.63 (% formamide)−600/#bp in duplex.

[0253] Any sub-titles herein are included for convenience only, and are not to be construed as limiting the disclosure in any way. The invention will now be further described with reference to the following non-limiting Figures and Examples. Other embodiments of the invention will occur to those skilled in the art in the light of these. The disclosure of all references cited herein, inasmuch as it may be used by those skilled in the art to carry out the invention, is hereby specifically incorporated herein by cross-reference.

### FIGURES

[0254] FIG. 1: GABRA5 CRISPRa in vitro screening. A. Schematic representation of the CRISPRa components: expression vectors containing (1) the different GABRA5 sgRNAs to be tested or control sgRNA targeting LacZ; (2) enzymatically inactivated Cas9 fused with transcription activators VP64 and a schematic representation of the RNA:Protein complex of the CRISPRa system. B. Schematic representation of the workflow to test the sgRNAs' efficiency by co-transfection of both plasmids into the mouse cell line N2A followed by total mRNA RT-qPCR comparative analysis. C. Normalized GABRA5 mRNA expression relative to LacZ control by three sgRNAs (n=8, ***p=0.0005, One-Way ANOVA with Bonferroni's post hoc test).

[0255] FIG. 2: qPCR data for Kcnq2, Kcnq3, Lgi1, Kcna2, Gabra1, Gabra2, Npy CRISPRa in vitro screening. A.

[0256] Normalized Kcnq2 mRNA expression relative to LacZ control by 5 sgRNAs (n=3/4, *p<0.05; **p<0.01;***p<0.001, One-Way ANOVA with Bonferroni's post hoc test). B. Normalized Kcnq3 mRNA expression relative to LacZ control by three sgRNAs (n=1). C. Normalized Lgi1 mRNA expression relative to LacZ control by three sgRNAs (n=3/4, One-Way ANOVA with Bonferroni's post hoc test). D. Normalized Kcna2 mRNA expression relative to LacZ control by three sgRNAs (n=4, **p<0.01, One-Way ANOVA with Bonferroni's post hoc test). E. Normalized Gabra1 mRNA expression relative to LacZ control by three sgRNAs (n=3, One-Way ANOVA with Bonferroni's post hoc test). F.

[0257] Normalized Gabra2 mRNA expression relative to LacZ control by three sgRNAs (n=1). G. Normalized Npy mRNA expression relative to LacZ control by three sgRNAs (n=4, ** p<⁰0.01, One-Way ANOVA with Bonferroni's post hoc test).

[0258] FIG. 3: Design of AAV9 constructs for MEA using dual sgRNAs and sadCAS9 driven by a human CAMK2A (also known as CaMKII) promoter specific for excitatory neurons.

[0259] FIG. 4: In vivo combinatorial KCNA1 and GABRA5 CRISPRa. A. Schematic representation of the CRISPRa components: AAV9 vectors containing (1) sgRNA:KCNA1-19 and sgRNA:GABRA5-3 or control sgRNA targeting LacZ; (2) enzymatically inactivated Cas9 fused with transcription activators VP64 and a schematic representation of the RNA:Protein complex of the multiplexing CRISPRa system. B. Schematic representation of the tri-transfection method of AAV production, where HEK-293T cells are transfected with a transgene, a capsid and a helper plasmid.

[0260] AAV virions can then be collected from the culture media and cell lysate. C. Schematic representation of the stereotaxic apparatus used for precise location intra-cerebral injections and schematic of the subcutaneous placement of the wireless ECoG transmitter battery and position of electrodes through burr holes. D. Timeline of intra-amygdala model and gene therapy protocol.

[0261] FIG. 5: In vivo combinatorial KCNA1 and GABRA5 CRISPRa. CRISPRa for Kcna1 alone (Kcna1-dCAS9A) was compared to the combination of Kcna1 and Gabra5 (Kcna1-Gabra5-dCAS9A). A. Number of seizures per day normalised to baseline. Left bar per each day refers to Kcna1-dCAS9A; Right bar per each day refers to Kcna1-Gabra5-dCAS9A. Greybox: after treatment. B. Percentage of seizures after treatment compared to baseline recording. C. Number of days seizure free in baseline compared to after the CRISPRa treatment. P=0.006 2-way ANOVA followed by Bonferroni multiple comparison test.

[0262] FIG. 6: MEA Kcnq2-Kcnq3 combination. MEA recordings were performed at 14 DIV, 7 days after AAV9 transduction with either control (lacz+sadCAS9), single sgRNAs+sadCAS9, or combined sgRNAs+sadCAS9. Different parameters were extracted such as Spike frequency, Burst Frequency, Network Burst frequency, Burst Duration, and Inter-burst Interval. Only the most relevant are shown here. *p<0.05; **p<0.01; ***p<0.001 One-Way ANOVA vs CTRL (LacZ) with Bonferroni's post hoc test.

[0263] FIG. 7: MEA Kcna2-Lgi1 combination. MEA recordings were performed at 14 DIV, 7 days after AAV9 transduction with either control (lacz+sadCAS9), single sgRNAs+sadCAS9, or combined sgRNAs+sadCAS9. Different parameters were extracted such as Spike Frequency, Burst Frequency, Network Burst Frequency, Burst Duration, and Inter-burst Interval. Only the most relevant are shown here. *p<0.05; **p<0.01; ***p<0.001; ****p<0.0001, One-Way ANOVA vs CTRL (LacZ) with Bonferroni's post hoc test.

[0264] FIG. 8: MEA Kcnq3-Lgi1 combination. MEA recordings were performed at 14 DIV, 7 days after AAV9 transduction with either control (lacz+sadCAS9), single sgRNAs+sadCAS9, or combined sgRNAs+sadCAS9. Different parameters were extracted such as Spike Frequency, Burst Frequency, Network Burst Frequency, Burst Duration, and Inter-burst Interval. Only the most relevant are shown here. *p<0.05 One-Way ANOVA vs CTRL (LacZ) with Bonferroni's post hoc test.

[0265] FIG. 9: Design AAV9 constructs for DRG recordings using dual sgRNAs and sadCAS9 driven by a CMV promoter.

[0266] FIG. 10: DRG patch clamp—Kcnq2-Kcnq3 combination. Current clamp recordings were performed at 5 DIV after dissociation and AAV9 transduction with either control (lacz+sadCAS9), single sgRNAs+sadCAS9 or combined sgRNAs+sadCAS9. Different parameters were extracted such as Number of Action Potentials, Maximal Firing Rate, and Current Threshold. Only the most relevant are shown here. *p<0.05; two-way ANOVA; *p<0.05, **p<0.01; One-Way ANOVA vs CTRL (LacZ) with Bonferroni's post hoc test.

[0267] FIG. 11: DRG patch clamp—Kcna2-Kcnj2 combination. Current clamp recordings were performed at 5 DIV after dissociation and AAV9 transduction with control (lacz+sadCAS9) or combined sgRNAs+sadCAS9. Different parameters were extracted such as Number of Action Potentials, Maximal Firing Rate, and Current Threshold. Only the most relevant are shown here. **p<0.01; two-way ANOVA; *p<0.05, Unpaired Student's t test.

[0268] FIG. 12: Schematic of a particularly preferred CRISPRa embodiment of the invention.

[0269] FIG. 13: Bioinformatic analysis of the human KCNA1 promoter, and sgRNA design in the 600 bp promoter region before the TSS for human KCNA1. Analysis of the promoter region for sgRNA using sadCas9 is also shown at bottom.

[0270] FIG. 14: RNAseq data from human KCNA1 experiments. A. Gene expression alterations in epilepsy and rescue after gene therapy with dCas9A driven expression of KCNA1 (NE=non epileptic; E=epileptic). B. Gene expression alterations in epilepsy for selected genes, known to be protective for epilepsy.

[0271] FIG. 15: Promoter Analysis for human GABRA5

[0272] FIG. 16: sgRNA design in the 600 bp promoter region before the TSS for human GABRA5. Analysis of the promoter region for sgRNA using sadCas9 is also shown at bottom.

[0273] FIG. 17: Promoter Analysis for human KCNA2

[0274] FIG. 18: sgRNA design in the 600 bp promoter region before the TSS for human KCNA2. Analysis of the promoter region for sgRNA using sadCas9 is also shown at bottom.

[0275] FIG. 19: Promoter Analysis for human LGI1

[0276] FIG. 20: sgRNA design in the 600 bp promoter region before the TSS for human LGI1. Analysis of the promoter region for sgRNA using sadCas9 is also shown at bottom.

[0277] FIG. 21: Promoter Analysis for human KCNC1

[0278] FIG. 22: sgRNA design in the 600 bp promoter region before the TSS for human KCNC1. Analysis of the promoter region for sgRNA using sadCas9 is also shown at bottom.

[0279] FIG. 23: Promoter Analysis for human KCNMA 1

[0280] FIG. 24: sgRNA design in the 600 bp promoter region before the TSS for human KCNMA1. Analysis of the promoter region for sgRNA using sadCas9 is also shown at bottom.

[0281] FIG. 25: Promoter Analysis for human KCNK2

[0282] FIG. 26: sgRNA design in the 600 bp promoter region before the TSS for human KCNK2. Analysis of the promoter region for sgRNA using sadCas9 is also shown at bottom.

[0283] FIG. 27: Promoter Analysis for human KCNQ2

[0284] FIG. 28: sgRNA design in the 600 bp promoter region before the TSS for human KCNQ2. Analysis of the promoter region for sgRNA using sadCas9 is also shown at bottom.

[0285] FIG. 29: Promoter Analysis for human KCNQ3

[0286] FIG. 30: sgRNA design in the 600 bp promoter region before the TSS for human KCNQ3. Analysis of the promoter region for sgRNA using sadCas9 is also shown at bottom.

[0287] FIG. 31: Promoter Analysis for human KCNJ6

[0288] FIG. 32: sgRNA design in the 600 bp promoter region before the TSS for human KCNJ6. Analysis of the promoter region for sgRNA using sadCas9 is also shown at bottom.

[0289] FIG. 33: Promoter Analysis for human GRM2

[0290] FIG. 34: sgRNA design in the 600 bp promoter region before the TSS for human GRM2. Analysis of the promoter region for sgRNA using sadCas9 is also shown at bottom.

[0291] FIG. 35: Promoter Analysis for human GDNF

[0292] FIG. 36: sgRNA design in the 600 bp promoter region before the TSS for human GDNF. Analysis of the promoter region for sgRNA using sadCas9 is also shown at bottom.

[0293] FIG. 37: Promoter Analysis for human NPY

[0294] FIG. 38: sgRNA design in the 600 bp promoter region before the TSS for human NPY. Analysis of the promoter region for sgRNA using sadCas9 is also shown at bottom.

[0295] FIG. 39: Promoter Analysis for human NPY2R

[0296] FIG. 40: sgRNA design in the 600 bp promoter region before the TSS for human NPY2R. Analysis of the promoter region for sgRNA using sadCas9 is also shown at bottom.

[0297] FIG. 41: Promoter Analysis for human GALP

[0298] FIG. 42: sgRNA design in the 600 bp promoter region before the TSS for human GALP. Analysis of the promoter region for sgRNA using sadCas9 is also shown at bottom.

[0299] FIG. 43: Promoter Analysis for human GALR1

[0300] FIG. 44: sgRNA design in the 600 bp promoter region before the TSS for human GALR1. Analysis of the promoter region for sgRNA using sadCas9 is also shown at bottom.

[0301] FIG. 45: Promoter Analysis for human PDYN

[0302] FIG. 46: sgRNA design in the 600 bp promoter region before the TSS for human PDYN. Analysis of the promoter region for sgRNA using sadCas9 is also shown at bottom.

[0303] FIG. 47: Promoter Analysis for human BDNF

[0304] FIG. 48: sgRNA design in the 600 bp promoter region before the TSS for human BDNF. Analysis of the promoter region for sgRNA using sadCas9 is also shown at bottom.

[0305] FIG. 49: Promoter Analysis for human FGF2

[0306] FIG. 50: sgRNA design in the 600 bp promoter region before the TSS for human FGF2. Analysis of the promoter region for sgRNA using sadCas9 is also shown at bottom.

[0307] FIG. 51: Promoter Analysis for human GABBR1

[0308] FIG. 52: sgRNA design in the 600 bp promoter region before the TSS for human GABBR1. Analysis of the promoter region for sgRNA using sadCas9 is also shown at bottom.

[0309] FIG. 53: Promoter Analysis for human GABBR2

[0310] FIG. 54: sgRNA design in the 600 bp promoter region before the TSS for human GABBR2. Analysis of the promoter region for sgRNA using sadCas9 is also shown at bottom.

[0311] FIG. 55: Promoter Analysis for human GRM3

[0312] FIG. 56: sgRNA design in the 600 bp promoter region before the TSS for human GRM3. Analysis of the promoter region for sgRNA using sadCas9 is also shown at bottom.

[0313] FIG. 57: Promoter Analysis for human GRM4

[0314] FIG. 58: sgRNA design in the 600 bp promoter region before the TSS for human GRM4. Analysis of the promoter region for sgRNA using sadCas9 is also shown at bottom.

[0315] FIG. 59: Promoter Analysis for human GRM7

[0316] FIG. 60: sgRNA design in the 600 bp promoter region before the TSS for human GRM7. Analysis of the promoter region for sgRNA using sadCas9 is also shown at bottom.

[0317] FIG. 61: Promoter Analysis for human GABRR1

[0318] FIG. 62: sgRNA design in the 600 bp promoter region before the TSS for human GABRR1. Analysis of the promoter region for sgRNA using sadCas9 is also shown at bottom.

[0319] FIG. 63: Promoter Analysis for human GABRR3

[0320] FIG. 64: sgRNA design in the 600 bp promoter region before the TSS for human GABRR3. Analysis of the promoter region for sgRNA using sadCas9 is also shown at bottom.

[0321] FIG. 65: Promoter Analysis for human OPRK1

[0322] FIG. 66: sgRNA design in the 600 bp promoter region before the TSS for human OPRK1. Analysis of the promoter region for sgRNA using sadCas9 is also shown at bottom.

[0323] FIG. 67: Promoter Analysis for human OPRM1

[0324] FIG. 68: sgRNA design in the 600 bp promoter region before the TSS for human OPRM1. Analysis of the promoter region for sgRNA using sadCas9 is also shown at bottom.

[0325] FIG. 69: Promoter Analysis for human OPRD1

[0326] FIG. 70: sgRNA design in the 600 bp promoter region before the TSS for human OPRD1. Analysis of the promoter region for sgRNA using sadCas9 is also shown at bottom.

[0327] FIG. 71: Promoter Analysis for human OPRL1

[0328] FIG. 72: sgRNA design in the 600 bp promoter region before the TSS for human OPRL1. Analysis of the promoter region for sgRNA using sadCas9 is also shown at bottom.

[0329] FIG. 73: Promoter Analysis for human KCNJ2

[0330] FIG. 74: sgRNA design in the 600 bp promoter region before the TSS for human KCNJ2. Analysis of the promoter region for sgRNA using sadCas9 is also shown at bottom.

[0331] FIG. 75: Promoter Analysis for human GABRA 1

[0332] FIG. 76: sgRNA design in the 600 bp promoter region before the TSS for human GABRA1. Analysis of the promoter region for sgRNA using sadCas9 is also shown at bottom.

[0333] FIG. 77: Promoter Analysis for human GABRA2

[0334] FIG. 78: sgRNA design in the 600 bp promoter region before the TSS for human GABRA2. Analysis of the promoter region for sgRNA using sadCas9 is also shown at bottom.

### EXAMPLES

### Example 1 —sgRNA Validation for Gabra5 and Testing In Vitro

[0335] 5 sgRNAs were made that were scored as top potential sequences in the proximal promoter of Gabra5 to increase its expression with CRISPRa. Furthermore, at least 3 sgRNAs were made that were scored as top potential sequences in the proximal promoter of Kcnq2, Kcnq3, Lgi1, Kcnj2, Gabra1, Gabra2, Npy and Kcna2 to increase their expression with CRISPRa.

[0336] They were co-transfected with sp or sadCas9-VP64 and total mRNA was analysed by RT-qPCR (FIG. 1B) by the procedure of described in Colasante 2020 and disclosed herein. Their ability to upregulate gene expression was validated using qPCR in N2A murine cells as previously described in Colasante 2020 (FIG. 1B, showing a schematic representation of the workflow to test the sgRNAs efficiency by co-transfection of both plasmids into the mouse cell line N2A followed by total mRNA RT-qPCR comparative analysis).

[0337] FIG. 1A shows a schematic representation of the CRISPRa components: expression vectors containing (1) the different Gabra5 sgRNAs to be tested or control sgRNA targeting LacZ; (2) enzymatically inactivated Cas9 fused with transcription activators VP64 and a schematic representation of the RNA:Protein complex of the CRISPRa system.

[0338] FIG. 1C (spdCas9) shows normalized Gabra5 mRNA expression relative to LacZ control by three sgRNAs (n=8, ***p=0.0005, One-Way ANOVA with Bonferroni's post hoc test). sgRNA3 was capable of significantly upregulating GABRA5 expression when transfected into the murine N2A cell line.

[0339] FIG. 2A (sadCAS9) shows normalized Kcnq2 mRNA expression relative to LacZ control by five sgRNAs (n=3/4, *p<0.05; **p<0.01;***p<0.001, One-Way ANOVA with Bonferroni's post hoc test). sgRNA5 was capable of significantly upregulating Kcnq2 expression when transfected into the murine N2A cell line.

[0340] FIG. 2B (sadCAS9) shows normalized Kcnq3 mRNA expression relative to LacZ control by three sgRNAs (n=1). sgRNA3 was capable of upregulating Kcnq3 expression when transfected into the murine N2A cell line.

[0341] FIG. 2C (sadCAS9) shows normalized Lgi1 mRNA expression relative to LacZ control by three sgRNAs (n=3/4, One-Way ANOVA with Bonferroni's post hoc test). sgRNA2 was capable of consistently upregulating Lgi1 expression when transfected into the murine N2A cell line.

[0342] FIG. 2D (sadCAS9) shows normalized Kcna2 mRNA expression relative to LacZ control by three sgRNAs (n=4, **p<0.01, One-Way ANOVA with Bonferroni's post hoc test). sgRNA2 was capable of significantly upregulating Kcna2 expression when transfected into the murine N2A cell line.

[0343] FIG. 2E (sadCAS9) shows normalized Gabra1 mRNA expression relative to LacZ control by three sgRNAs (n=3, One-Way ANOVA with Bonferroni's post hoc test). sgRNA1 was capable of upregulating Gabra1 expression when transfected into the murine N2A cell line.

[0344] FIG. 2F (sadCAS9) shows normalized Gabra2 mRNA expression relative to LacZ control by three sgRNAs (n=1, One-Way ANOVA with Bonferroni's post hoc test). sgRNA1 was capable of upregulating Gabra2 expression when transfected into the murine N2A cell line.

[0345] FIG. 2G (sadCAS9) shows normalized Npy mRNA expression relative to LacZ control by three sgRNAs (n=4, ** p<0.01, One-Way ANOVA with Bonferroni's post hoc test). sgRNA2 was capable of significantly upregulating Npy expression when transfected into the murine N2A cell line.

### Example 2—Determination of Target Genes for Combinatorial Gene Therapy

[0346] Although a previous study (Colasante 2020) provided the proof of principle for a translational CRISPR-based approach to treat neurological diseases, only a 50% decrease in seizures was observed. A similar degree of efficacy has been observed with other gene therapy approaches for epilepsy.

[0347] Furthermore, although CRISPRa targeting Kcna1 led to a degree of rescue at the level of transcriptomics some altered gene expression was not fully corrected. Among these genes Gabra5, encoding the alpha5 subunit of GABAA receptors that contribute to tonic inhibition, was found to be downregulated in epileptic animals both before and after the therapy (FIG. 14). Importantly, loss of function GABRA5 mutations have been associated with severe epileptic encephalopathies.

[0348] A combination therapy targeting endogenous KCNA1 and GABRA5 genes thus may lead to improved treatment of neurological diseases and disorders.

[0349] Moreover, the combinatorial activation of genes known to influence neuronal firing may lead to improved treatments for neurological diseases and disorders. Among these combinations KCNQ2 and KCNQ3, LGI1 and KCNA1 are promising for epilepsy; KCNA1 and KCNJ2, KCNQ2 and KCNQ3 are promising for pain.

### Example 3—AAV9 Production, Test In Vitro and Injection In Vivo for Combinatorial Gene Therapy

[0350] High-titer AAV9 have been produced. Either Kcna1/Gabra5-dCAS9A or Kcna1-dCAS9A (using the spdCas9) were transduced in primary hippocampal neurons and then tested for efficacy using qPCR and multielectrode arrays(MEAs)/or patch clamp electrophysiology at 14 DIV after infection. The Gabra5 sgRNA used was sgRNA3 from Example 1. The Kcna1 sgRNA is disclosed in the sequence annex.

[0351] Furthermore either Kcnq2-sadCAS9 or Kcnq3-sadCAS9 or Kcnq2/Kcnq3-sadCAS9, or Kcna2-sadCAS9 or Lgi1-sadCAS9 or Kcna2/Lgi1-sadCas9, or Kcnq3-sadCAS9 or Lgi1-sadCAS9 or Kcnq3/Lgi1-sadCas9 (using the sadCAS9-FIG. 3) were transduced in primary hippocampal neurons and then tested for efficacy using multielectrode arrays (MEAs) at 14 DIV after infection.

[0352] Status epilepticus (SE) was induced in mice by injecting kainic acid (KA) into the amygdala as previously described (Colasante, Qiu et al 2020) and treatment was then assessed.

[0353] Kcna1/Gabra5-dCAS9A vs Kcna1-dCAS9A was injected 2 weeks after SE and the CRISPRa tool was activated 2 weeks after an EEG baseline recording. Wireless EEG transmitters (Open Source Instruments) were implanted at 2 weeks post SE in parallel with the viral injection (2 AAVs controlled by doxycycline as previous described).

[0354] CRISPRa activation was achieved changing the normal diet to doxycycline supplement food. 3 weeks of EEG recordings after CRISPRa activation was performed. The animals were randomized and the researcher blinded to AAV. The mice were monitored with EEG-video telemetry for 5 weeks.

[0355] Behavioral features will be assessed in epileptic animals before and after the treatment such as novel object location, open field, T-Maze and a control test not related to hippocampal function (olfactory discrimination). Naïve animals injected either with Kcna1/Gabra5-dCAS9A or Kcna1-dCAS9A will be used at the same time points to assess changes in basal behavioral tasks.

[0356] All AAV transfer plasmids for viral production (FIG. 4A) have already been produced and viruses have been produced in-house (FIG. 4B). Animals have been already injected with KA to induce the epilepsy model, already established in the lab, and transmitters will be implanted (FIG. 4C and FIG. 4D). The virus was then be injected as a potential gene therapy, where video-ECoG were used to assess its efficacy (FIG. 4D).

[0357] An improvement in reduction of number of seizures was observed when animals were injected with Kcna1/Gabra5-dCAS9A compared to Kcna1-dCAS9A (FIG. 5A and FIG. 5B). Importantly, after CRISPRa activation animals injected with Kcna1/Gabra5-dCAS9A showed a net increase in days seizures free compared to animals injected with Kcna1-dCAS9A (FIG. 5C). This result shows that combinatorial Kcna1 and Gabra5 CRISPRa therapy is more efficient in rescuing the epileptic phenotype compared to the single Kcna1 CRISPRa treatment.

[0358] FIG. 6, FIG. 7 and FIG. 8 show a significant decrease in network excitability with the combinatorial approaches compared to control and single sgRNAs. This is associated with a greater antiepileptic effect as previously described (Qiu et al. 2022 Science).

### Example 4—Further sgRNA Design

[0359] Encyclopedia of DNA Elements (ENCODE) and the Functional ANnoTation Of the Mammalian genome (FANTOM) (Carninci et al., 2006) databases were used to download transcriptomics and epigenetics NGS data for each single human gene. Tracks were visualized along the human reference genome with the Integrative Genome Viewer (IGV) (Thorvaldsdottir et al., 2013). Relevant promoter sequences 600 bp before the estimated Transcription Starting Site (TSS) were used to design the sgRNAs with CHOPCHOP (http://chopchop.cbu.uib.no/).

[0360] Based on this analysis, several lead candidates were generated for a variety of human gene promoter sequences.

### Example 5—AAV9 Production, Test In Vitro in DRG Neurons for Combinatorial Gene Therapy

[0361] High-titer AAV9 have been produced. Either Kcnq2-sadCAS9 or Kcnq3-sadCAS9 or Kcnq2/Kcnq3-sadCAS9, or Kcna2-sadCAS9 or Kcnj2-sadCAS9 or Kcna2/kcnj2-sadCas9 (using the sadCAS9—FIG. 9) were transduced in dissociated DRG neurons and then tested for efficacy using patch clamp electrophysiology at 3-6 DIV after infection.

[0362] FIG. 10 and FIG. 11 show a significant decrease in DRG excitability with both the combinatorial approaches compared to control and single sgRNAs. This can be associated with an in vivo therapeutic anti-pain effect (Krames E. S. 2015 Neuromodulation).

### Example 6—Selected Materials and Methods

[0363] Antibiotic screening in N2A or P19 cells lines: N2A cells were transfected with pAAV-plasmids that may contain sgRNA sequence, sadCas9 and antibiotic blasticidine resistance gene. The transfected N2A cells were selected for with 20 mg/ml blasticidine for 48 hours in growth media. RNA extraction from N2A cells was carried out using RNAeasy Kit (Qiagen #74104) according to the manufacturer's instruction. cDNA synthesis for quantitative RT-PCR (RT-qPCR) was acquired using the SuperScript™ IV Reverse Transcriptase system. A Custom designed oligonucleotides was used to carry out RT-qPCR along with SYBR™ Green qPCR Mix. The relative expression was measured using the DDCT method, relative to the LacZ-sa_sgRNA condition.

[0364] AAV production was carried out using protocol adapted from Grieger et al, 2006. HEK 293T was previously maintained and passage weekly after reaching 80-90% confluency. The HEK 293T were then plates on 10×150 cm2 Petri Dishes (Thermo Scientific™ Nunc™ Cell Culture/Petri Dishes). Cells were then co-transfected following plating with helper, cap-rep and transfer plasmids at a molar ratio of 3:1:1, PEI MAX transfection reagent (PEI MAX—Transfection Grade Linear Polyethylenimine Hydrochloride (MW 40,000)) was used at a ratio of 2 PEI: 1 DNA diluted in Opti-MEM (Opti-MEM I Reduced Serum Media). Typical harvest time was 96-120 hours after transfection. The viral particles were then purified using the iodixanol gradient method. The layer containing the viral particles was carefully extracted using an 18-gauge needle from the side of the tube. The AAV titers were then calculated using AAVpro® Titration Kit (Takara).

[0365] All the in-house AAV produced had as estimated titer of at least least 10¹³ vg/ml, sufficient for in vitro production. There are a total of 15 viruses produced from the in-house AAV production.

[0366] Mouse embryonic neuronal primary cultures were prepared and seeded on Axion multi-well multi-electro array (CytoView-24 well, Axion Biosystems) plate at 30,000-50,000 cells/well density. The neurons were transduced with AAV9 viruses at multiplicity of infection (MOI) >10\hat{ }9 at DIV7-10. The recordings were taken at 37 degree, 5% CO2 concentration for 10 minutes at 13 and 15 DIV. The analysis were performed with AXIS Navigator (Axion Biosystems).

[0367] The wells with no less than 50% active electrodes were considered viable data. The minimum vitality covered resistance is 18kΩ. The spikes were defined with more than 6×STD above the baseline. The bursts were defined with Inter-burst interval (ISIS) threshold algorithm, maximum inter-spike interval of 100 ms and minimum 5 spikes/burst. The minimum participating electrodes in a network burst is 35%.

[0368] Electrophysiology (in vitro, DRG neurons): dorsal ganglion neurons were dissected out and seeded at 1000 cells per coverslip (13 mm) and cultured for 7 days. The neurons were transduced with AAV9 at MOI>10\hat{ }9 on ODIV. For current-clamp recordings, the internal solution (pipette) contains (in mM) 140 KCl, 0.5 EGTA, 5 HEPES, 3 Mg-ATP, pH=7.3.

[0369] The extracellular solution (bath) contains (mM) 140 NaCl, 3 KCl, 1 MgCl, 1 CaCl2.2H2O, 10 HEPES, pH=7.3. The appropriate sub-type of DRG neurons were identified with visual confirmation, the cells were held at RMP or −60 mV, while injecting series of 1 s, 20 pA current steps from −20 pA to 600 pA. A ramp protocol from −20 pA to 600 pA in 1 s was evoked after the current step protocol completion. Recordings are acquired using a Axon Axopatch 200B Microelectrode Amplifier, filtered at 10 kHz and digitized at 50 kHz via a Digidata 1550B (Axon Instruments) combined with Clampex 10.4.

[0370] Expression vectors may be generated in the following exemplary protocols:

[0371] Small guide RNAs are cloned into a AAV (adeno-associated virus) vector with a U6 promoter (hU6) and saCas9 compatible scaffold. A defective Cas9 fused to the VP64 activator domain is cloned into a plasmid with Blasticidine (BSD) resistance gene, under the control of a CMV promoter (CMV-sadCas9-VP64-BSD). The sadCas9-VP64 cassette was obtained from a gift plasmid (pJEP304) from the Ploski lab. And the BSD-resistance gene was extracted from lentiviral plasmid dsaCas9-VP64_Blast.

[0372] For neuronal expressions, the CMV promoter from pJEP304 was digested and replaced with a short human CaMKII (shCaMKII) promoter sequence first with Mlul and EcoRI to produce shCaMKII-sadCas9-VP64. The sgRNA cassette (hU6-sgRNA) was extracted from pAAV-hU6-sgRNA-CMV-sadCas9-VP64-BSD with Mlul digestion and cloned into shCaMKII-sadCas9-VP64.

[0373] The dual-sgRNA cassette (hU6-sgRNA1-hU6-sgRNA2) was synthesised by GeneArt. The dual-sgRNA cassette for neuronal expression was cloned into shCaMKII-sadCas9-VP64 with Mlul and EcoRI digestion and ligation.

[0374] For DRG neuronal expressions, the sgRNA cassette was digested with Mlul and cloned directly into pJEP304 under the control of CMV promoter. The dual-sgRNA cassette (hU6-sgRNA1-hU6-sgRNA2) was synthesised by GeneArt.

[0375] The dual-sgRNA cassette was cloned into the pJEP304 with Mlul digestion.

### List of selected references

[0376] Colasante G et al, In vivo CRISPRa decreases seizures and rescues cognitive deficits in a rodent model of epilepsy, Brain, Volume 143, Issue 3, March 2020, Pages 891-905, gj
[0377] Colasante G et al, dCas9-Based Scn1a Gene Activation Restores Inhibitory Interneuron Excitability and Attenuates Seizures in Dravet Syndrome Mice. Mol Ther. 2020 Jan. 8; 28(1):235-253. doi: 10.1016/j.ymthe.2019.08.018. Epub 2019 Sep 3. PMID: 31607539; PMCID: PMC6952031
[0378] Woldbye D P D et al, Adeno-associated viral vector-induced overexpression of neuropeptide Y Y2 receptors in the hippocampus suppresses seizures, Brain, Volume 133, Issue 9, September 2010, Pages 2778-2788,
[0379] Wykes R C et al, Optogenetic and potassium channel gene therapy in a rodent model of focal neocortical epilepsy. Sci Transl Med. 2012 Nov. 21; 4(161):161ra152. doi: 10.1126/scitranslmed.3004190. Epub 2012 Nov 12. PMID: 23147003; PMCID: PMC3605784
[0380] Konermann, S., Brigham, M., Trevino, A. et al. Genome-scale transcriptional activation by an engineered CRISPR-Cas9 complex. Nature 517, 583-588 (2015). o; 3 j
[0381] Dominguez A A, et al, Beyond editing: repurposing CRISPR-Cas9 for precision genome regulation and interrogation. Nat Rev Mol Cell Biol. 2016 January; 17(1):5-15. doi: 10.1038/nrm.2015.2. Epub 2015 Dec 16. PMID: 26670017; PMCID: PMC4922510.
[0382] Adli M. The CRISPR tool kit for genome editing and beyond. Nat Commun. 2018 May 15; 9(1):1911. doi: 10.1038/s41467-018-04252-2. PMID: 29765029; PMCID: PMC5953931
[0383] Liao H K et al, In Vivo Target Gene Activation via CRISPR/Cas9-Mediated Trans-epigenetic Modulation. Cell. 2017 Dec. 14; 171(7):1495-1507.e15. doi: 10.1016/j.cell.2017.10.025. Epub 2017 Dec 7. PMID: 29224783; PMCID: PMC5732045
[0384] Carninci P et al, Genome-wide analysis of mammalian promoter architecture and evolution. Nat Genet. 2006 Jun; 38(6):626-35. doi: 10.1038/ng1789. Epub 2006 Apr 28. Erratum in: Nat Genet. 2007 September; 39(9):1174. PMID: 16645617
[0385] Thorvaldsd6ttir H et al, Integrative Genomics Viewer (IGV): high-performance genomics data visualization and exploration. Brief Bioinform. 2013 March; 14(2):178-92. doi: 10.1093/bib/bbs017. Epub 2012 Apr 19. PMID: 22517427; PMCID: PMC3603213.
[0386] Vivekananda U et al, Mutant Kv1.1 impairs presynaptic analog signaling, Proceedings of the National Academy of Sciences Feb 2017, 114 (9) 2395-2400; DOI: 10.1073/pnas.1608763114
[0387] Butler K M et al, De novo variants in GABRA2 and GABRA5 alter receptor function and contribute to early-onset epilepsy. Brain. 2018 Aug. 1; 141(8):2392-2405. doi: 10.1093/brain/awy171. PMID: 29961870; PMCID: PMC6061692.
[0388] Hernandez C C et al, Altered inhibitory synapses in de novo GABRA5 and GABRA1 mutations associated with early onset epileptic encephalopathies. Brain. 2019 Jul. 1; 142(7):1938-1954. doi: 10.1093/brain/awz123. PMID: 31056671; PMCID: PMC6598634
[0389] Szymczak A L, Vignali D A. Development of 2A peptide-based strategies in the design of multicistronic vectors. Expert Opin Biol Ther. 2005 May; 5(5):627-38. doi: 10.1517/14712598.5.5.627. PMID: 15934839
[0390] Sorensen A T et al, A robust activity marking system for exploring active neuronal ensembles. Elife. 2016 Sep. 23; 5:e13918. doi: 10.7554/eLife.13918. PMID: 27661450; PMCID: PMC5035142
[0391] Colasante G et al, Rapid Conversion of Fibroblasts into Functional Forebrain GABAergic Interneurons by Direct Genetic Reprogramming. Cell Stem Cell. 2015 Dec. 3; 17(6):719-734. doi: 10.1016/j.stem.2015.09.002. Epub 2015 Oct 29. PMID: 26526726
[0392] Morabito G at al, AAV-PHP.B-Mediated Global-Scale Expression in the Mouse Nervous System Enables GBA1 Gene Therapy for Wide Protection from Synucleinopathy. Mol Ther. 2017 Dec. 6; 25(12):2727-2742. doi: 10.1016/j.ymthe.2017.08.004. Epub 2017 Aug 10. PMID: 28882452; PMCID: PMC5768559
[0393] Beaudoin G M 3rd, Lee S H, Singh D, Yuan Y, Ng Y G, Reichardt LF, et al. Culturing pyramidal neurons from the early postnatal mouse hippocampus and cortex. Nat Protoc 2012; 7: 1741-54
[0394] Pozzi D, Lignani G, Ferrea E, Contestabile A, Paonessa F, D′Alessandro R, et al. REST/NRSF-mediated intrinsic homeostasis protects neuronal networks from hyperexcitability. EMBO J 2013; 32: 2994-3007
[0395] Morris G, Leite M, Kullmann D M, Pavlov I, Schorge S, Lignani G. Activity clamp provides insights into paradoxical effects of the antiseizure drug carbamazepine. J Neurosci 2017; 37: 5484-95
[0396] Magloire V, Cornford J, Lieb A, Kullmann D M, Pavlov I. KCC2 overexpression prevents the paradoxical seizure-promoting action of somatic inhibition. Nat Commun 2019; 10: 1225
[0397] Breiman L. Random Forests. Machine Learning 2001; 45: 5-32
[0398] Leger M, Quiedeville A, Bouet V, Haelewyn B, Boulouard M, Schumann-Bard P, et al. Object recognition test in mice. Nat Protoc 2013; 8: 2531-7.

Sequence Annex

Nucleotide sequence of sgRNA for mouse GABRA5; sgRNA1 (SEQ ID NO: 1)
GAGCGAGCGCGAGTCCGCCG
Nucleotide sequence of sgRNA for mouse GABRA5; sgRNA2 (SEQ ID NO: 2)
GGTGACTAGCGATTATTCCA
Nucleotide sequence of synthetic guide RNA for mouse GABRA5; synthetic guide RNA3 (SEQ ID NO: 3)
AACATGGTCTTTCCCGAAGC
Nucleotide sequence of sgRNA for mouse GABRA5; sgRNA Lac Z control (SEQ ID NO: 4)
TGCGAATACGCCCACGCGAT
pAAV-TetON dCas9-VP64 used in in vivo experiments (SEQ ID NO: 5)
CCTGCAGGCAGCTGCGCGCTCGCTCGCTCACTGAGGCCGCCCGGGCAAAGCCCGGGCGTCGGGCGACCTTTG
GTCGCCCGGCCTCAGTGAGCGAGCGAGCGCGCAGAGAGGGAGTGGCCAACTCCATCACTAGGGGTTCCTGCG
GCCTCTAGACCAGTTTGGTTAGATCTCGAGTTTACCACTCCCTATCAGTGATAGAGAAAAGTGAAAGTCGAGTTT
ACCACTCCCTATCAGTGATAGAGAAAAGTGAAAGTCGAGTTTACCACTCCCTATCAGTGATAGAGAAAAGTGAAA
GTCGAGTTTACCACTCCCTATCAGTGATAGAGAAAAGTGAAAGTCGAGTTTACCACTCCCTATCAGTGATAGAGA
AAAGTGAAAGTCGAGTTTACCACTCCCTATCAGTGATAGAGAAAAGTGAAAGTCGAGTTTACCACTCCCTATCAG
TGATAGAGAAAAGTGAAAGTCGAGCTCGGTACCCGGGTCGAGTAGGCGTGTACGGTGGGAGGCCTATATAAGC
AGAGCTCGTTTAGTGAACCGTCAGATCGCACCGGTGTCGACTCTAGAGCCACCATGCCCAAGAAGAAGAGGAA
GGTGGGAAGGGGGATGGACAAGAAGTACTCCATTGGGCTCGCTATCGGCACAAACAGCGTCGGCTGGGCCGT
CATTACGGACGAGTACAAGGTGCCGAGCAAAAAATTCAAAGTTCTGGGCAATACCGATCGCCACAGCATAAAGA
AGAACCTCATTGGCGCCCTCCTGTTCGACTCCGGGGAGACGGCCGAAGCCACGCGGCTCAAAAGAACAGCACG
GCGCAGATATACCCGCAGAAAGAATCGGATCTGCTACCTGCAGGAGATCTTTAGTAATGAGATGGCTAAGGTGG
ATGACTCTTTCTTCCATAGGCTGGAGGAGTCCTTTTTGGTGGAGGAGGATAAAAAGCACGAGCGCCACCCAATC
TTTGGCAATATCGTGGACGAGGTGGCGTACCATGAAAAGTACCCAACCATATATCATCTGAGGAAGAAGCTTGTA
GACAGTACTGATAAGGCTGACTTGCGGTTGATCTATCTCGCGCTGGCGCATATGATCAAATTTCGGGGACACTT
CCTCATCGAGGGGGACCTGAACCCAGACAACAGCGATGTCGACAAACTCTTTATCCAACTGGTTCAGACTTACA
ATCAGCTTTTCGAAGAGAACCCGATCAACGCATCCGGAGTTGACGCCAAAGCAATCCTGAGCGCTAGGCTGTCC
AAATCCCGGCGGCTCGAAAACCTCATCGCACAGCTCCCTGGGGAGAAGAAGAACGGCCTGTTTGGTAATCTTAT
CGCCCTGTCACTCGGGCTGACCCCCAACTTTAAATCTAACTTCGACCTGGCCGAAGATGCCAAGCTTCAACTGA
GCAAAGACACCTACGATGATGATCTCGACAATCTGCTGGCCCAGATCGGCGACCAGTACGCAGACCTTTTTTTG
GCGGCAAAGAACCTGTCAGACGCCATTCTGCTGAGTGATATTCTGCGAGTGAACACGGAGATCACCAAAGCTCC
GCTGAGCGCTAGTATGATCAAGCGCTATGATGAGCACCACCAAGACTTGACTTTGCTGAAGGCCCTTGTCAGAC
AGCAACTGCCTGAGAAGTACAAGGAAATTTTCTTCGATCAGTCTAAAAATGGCTACGCCGGATACATTGACGGCG
GAGCAAGCCAGGAGGAATTTTACAAATTTATTAAGCCCATCTTGGAAAAAATGGACGGCACCGAGGAGCTGCTG
GTAAAGCTTAACAGAGAAGATCTGTTGCGCAAACAGCGCACTTTCGACAATGGAAGCATCCCCCACCAGATTCA
CCTGGGCGAACTGCACGCTATCCTCAGGCGGCAAGAGGATTTCTACCCCTTTTTGAAAGATAACAGGGAAAAGA
TTGAGAAAATCCTCACATTTCGGATACCCTACTATGTAGGCCCCCTCGCCCGGGGAAATTCCAGATTCGCGTGG
ATGACTCGCAAATCAGAAGAGACCATCACTCCCTGGAACTTCGAGGAAGTCGTGGATAAGGGGGCCTCTGCCCA
GTCCTTCATCGAAAGGATGACTAACTTTGATAAAAATCTGCCTAACGAAAAGGTGCTTCCTAAACACTCTCTGCTG
TACGAGTACTTCACAGTTTATAACGAGCTCACCAAGGTCAAATACGTCACAGAAGGGATGAGAAAGCCAGCATTC
CTGTCTGGAGAGCAGAAGAAAGCTATCGTGGACCTCCTCTTCAAGACGAACCGGAAAGTTACCGTGAAACAGCT
CAAAGAAGACTATTTCAAAAAGATTGAATGTTTCGACTCTGTTGAAATCAGCGGAGTGGAGGATCGCTTCAACGC
ATCCCTGGGAACGTATCACGATCTCCTGAAAATCATTAAAGACAAGGACTTCCTGGACAATGAGGAGAACGAGG
ACATTCTTGAGGACATTGTCCTCACCCTTACGTTGTTTGAAGATAGGGAGATGATTGAAGAACGCTTGAAAACTT
ACGCTCATCTCTTCGACGACAAAGTCATGAAACAGCTCAAGAGGCGCCGATATACAGGATGGGGGCGGCTGTC
AAGAAAACTGATCAATGGGATCCGAGACAAGCAGAGTGGAAAGACAATCCTGGATTTTCTTAAGTCCGATGGATT
TGCCAACCGGAACTTCATGCAGTTGATCCATGATGACTCTCTCACCTTTAAGGAGGACATCCAGAAAGCACAAGT
TTCTGGCCAGGGGGACAGTCTTCACGAGCACATCGCTAATCTTGCAGGTAGCCCAGCTATCAAAAAGGGAATAC
TGCAGACCGTTAAGGTCGTGGATGAACTCGTCAAAGTAATGGGAAGGCATAAGCCCGAGAATATCGTTATCGAG
ATGGCCCGAGAGAACCAAACTACCCAGAAGGGACAGAAGAACAGTAGGGAAAGGATGAAGAGGATTGAAGAGG
GTATAAAAGAACTGGGGTCCCAAATCCTTAAGGAACACCCAGTTGAAAACACCCAGCTTCAGAATGAGAAGCTCT
ACCTGTACTACCTGCAGAACGGCAGGGACATGTACGTGGATCAGGAACTGGACATCAATCGGCTCTCCGACTAC
GACGTGGCTGCTATCGTGCCCCAGTCTTTTCTCAAAGATGATTCTATTGATAATAAAGTGTTGACAAGATCCGATA
AAGCTAGAGGGAAGAGTGATAACGTCCCCTCAGAAGAAGTTGTCAAGAAAATGAAAAATTATTGGCGGCAGCTG
CTGAACGCCAAACTGATCACACAACGGAAGTTCGATAATCTGACTAAGGCTGAACGAGGTGGCCTGTCTGAGTT
GGATAAAGCCGGCTTCATCAAAAGGCAGCTTGTTGAGACACGCCAGATCACCAAGCACGTGGCCCAAATTCTCG
ATTCACGCATGAACACCAAGTACGATGAAAATGACAAACTGATTCGAGAGGTGAAAGTTATTACTCTGAAGTCTA
AGCTGGTCTCAGATTTCAGAAAGGACTTTCAGTTTTATAAGGTGAGAGAGATCAACAATTACCACCATGCGCATG
ATGCCTACCTGAATGCAGTGGTAGGCACTGCACTTATCAAAAAATATCCCAAGCTTGAATCTGAATTTGTTTACG
GAGACTATAAAGTGTACGATGTTAGGAAAATGATCGCAAAGTCTGAGCAGGAAATAGGCAAGGCCACCGCTAAG
TACTTCTTTTACAGCAATATTATGAATTTTTTCAAGACCGAGATTACACTGGCCAATGGAGAGATTCGGAAGCGAC
CACTTATCGAAACAAACGGAGAAACAGGAGAAATCGTGTGGGACAAGGGTAGGGATTTCGCGACAGTCCGGAA
GGTCCTGTCCATGCCGCAGGTGAACATCGTTAAAAAGACCGAAGTACAGACCGGAGGCTTCTCCAAGGAAAGTA
TCCTCCCGAAAAGGAACAGCGACAAGCTGATCGCACGCAAAAAAGATTGGGACCCCAAGAAATACGGCGGATTC
GATTCTCCTACAGTCGCTTACAGTGTACTGGTTGTGGCCAAAGTGGAGAAAGGGAAGTCTAAAAAACTCAAAAGC
GTCAAGGAACTGCTGGGCATCACAATCATGGAGCGATCAAGCTTCGAAAAAAACCCCATCGACTTTCTCGAGGC
GAAAGGATATAAAGAGGTCAAAAAAGACCTCATCATTAAGCTTCCCAAGTACTCTCTCTTTGAGCTTGAAAACGG
CCGGAAACGAATGCTCGCTAGTGCGGGCGAGCTGCAGAAAGGTAACGAGCTGGCACTGCCCTCTAAATACGTT
AATTTCTTGTATCTGGCCAGCCACTATGAAAAGCTCAAAGGGTCTCCCGAAGATAATGAGCAGAAGCAGCTGTTC
GTGGAACAACACAAACACTACCTTGATGAGATCATCGAGCAAATAAGCGAATTCTCCAAAAGAGTGATCCTCGCC
GACGCTAACCTCGATAAGGTGCTTTCTGCTTACAATAAGCACAGGGATAAGCCCATCAGGGAGCAGGCAGAAAA
CATTATCCACTTGTTTACTCTGACCAACTTGGGCGCGCCTGCAGCCTTCAAGTACTTCGACACCACCATAGACAG
AAAGCGGTACACCTCTACAAAGGAGGTCCTGGACGCCACACTGATTCATCAGTCAATTACGGGGCTCTATGAAA
CAAGAATCGACCTCTCTCAGCTCGGTGGAGACAGCAGGGCTGACCCCAAGAAGAAGAGGAAGGTGGAGGCCA
GCGGTTCCGGACGGGCTGACGCATTGGACGATTTTGATCTGGATATGCTGGGAAGTGACGCCCTCGATGATTTT
GACCTTGACATGCTTGGTTCGGATGCCCTTGATGACTTTGACCTCGACATGCTCGGCAGTGACGCCCTTGATGA
TTTCGACCTGGACATGCTGATTAACTCTAGATAAGAATTCAATAAAAGATCTTTATTTTCATTAGATCTGTGTGTTG
GTTTTTTGTGTGCGGCCGCAGGAACCCCTAGTGATGGAGTTGGCCACTCCCTCTCTGCGCGCTCGCTCGCTCAC
TGAGGCCGGGCGACCAAAGGTCGCCCGACGCCCGGGCTTTGCCCGGGCGGCCTCAGTGAGCGAGCGAGCGC
GCAGCTGCCTGCAGGGGCGCCTGATGCGGTATTTTCTCCTTACGCATCTGTGCGGTATTTCACACCGCATACGT
CAAAGCAACCATAGTACGCGCCCTGTAGCGGCGCATTAAGCGCGGCGGGTGTGGTGGTTACGCGCAGCGTGA
CCGCTACACTTGCCAGCGCCCTAGCGCCCGCTCCTTTCGCTTTCTTCCCTTCCTTTCTCGCCACGTTCGCCGGC
TTTCCCCGTCAAGCTCTAAATCGGGGGCTCCCTTTAGGGTTCCGATTTAGTGCTTTACGGCACCTCGACCCCAAA
AAACTTGATTTGGGTGATGGTTCACGTAGTGGGCCATCGCCCTGATAGACGGTTTTTCGCCCTTTGACGTTGGA
GTCCACGTTCTTTAATAGTGGACTCTTGTTCCAAACTGGAACAACACTCAACCCTATCTCGGGCTATTCTTTTGAT
TTATAAGGGATTTTGCCGATTTCGGCCTATTGGTTAAAAAATGAGCTGATTTAACAAAAATTTAACGCGAATTTTAA
CAAAATATTAACGTTTACAATTTTATGGTGCACTCTCAGTACAATCTGCTCTGATGCCGCATAGTTAAGCCAGCCC
CGACACCCGCCAACACCCGCTGACGCGCCCTGACGGGCTTGTCTGCTCCCGGCATCCGCTTACAGACAAGCTG
TGACCGTCTCCGGGAGCTGCATGTGTCAGAGGTTTTCACCGTCATCACCGAAACGCGCGAGACGAAAGGGCCT
CGTGATACGCCTATTTTTATAGGTTAATGTCATGATAATAATGGTTTCTTAGACGTCAGGTGGCACTTTTCGGGGA
AATGTGCGCGGAACCCCTATTTGTTTATTTTTCTAAATACATTCAAATATGTATCCGCTCATGAGACAATAACCCT
GATAAATGCTTCAATAATATTGAAAAAGGAAGAGTATGAGTATTCAACATTTCCGTGTCGCCCTTATTCCCTTTTTT
GCGGCATTTTGCCTTCCTGTTTTTGCTCACCCAGAAACGCTGGTGAAAGTAAAAGATGCTGAAGATCAGTTGGGT
GCACGAGTGGGTTACATCGAACTGGATCTCAACAGCGGTAAGATCCTTGAGAGTTTTCGCCCCGAAGAACGTTT
TCCAATGATGAGCACTTTTAAAGTTCTGCTATGTGGCGCGGTATTATCCCGTATTGACGCCGGGCAAGAGCAACT
CGGTCGCCGCATACACTATTCTCAGAATGACTTGGTTGAGTACTCACCAGTCACAGAAAAGCATCTTACGGATGG
CATGACAGTAAGAGAATTATGCAGTGCTGCCATAACCATGAGTGATAACACTGCGGCCAACTTACTTCTGACAAC
GATCGGAGGACCGAAGGAGCTAACCGCTTTTTTGCACAACATGGGGGATCATGTAACTCGCCTTGATCGTTGGG
AACCGGAGCTGAATGAAGCCATACCAAACGACGAGCGTGACACCACGATGCCTGTAGCAATGGCAACAACGTT
GCGCAAACTATTAACTGGCGAACTACTTACTCTAGCTTCCCGGCAACAATTAATAGACTGGATGGAGGCGGATAA
AGTTGCAGGACCACTTCTGCGCTCGGCCCTTCCGGCTGGCTGGTTTATTGCTGATAAATCTGGAGCCGGTGAGC
GTGGAAGCCGCGGTATCATTGCAGCACTGGGGCCAGATGGTAAGCCCTCCCGTATCGTAGTTATCTACACGAC
GGGGAGTCAGGCAACTATGGATGAACGAAATAGACAGATCGCTGAGATAGGTGCCTCACTGATTAAGCATTGGT
AACTGTCAGACCAAGTTTACTCATATATACTTTAGATTGATTTAAAACTTCATTTTTAATTTAAAAGGATCTAGGTG
AAGATCCTTTTTGATAATCTCATGACCAAAATCCCTTAACGTGAGTTTTCGTTCCACTGAGCGTCAGACCCCGTAG
AAAAGATCAAAGGATCTTCTTGAGATCCTTTTTTTCTGCGCGTAATCTGCTGCTTGCAAACAAAAAAACCACCGCT
ACCAGCGGTGGTTTGTTTGCCGGATCAAGAGCTACCAACTCTTTTTCCGAAGGTAACTGGCTTCAGCAGAGCGC
AGATACCAAATACTGTCCTTCTAGTGTAGCCGTAGTTAGGCCACCACTTCAAGAACTCTGTAGCACCGCCTACAT
ACCTCGCTCTGCTAATCCTGTTACCAGTGGCTGCTGCCAGTGGCGATAAGTCGTGTCTTACCGGGTTGGACTCA
AGACGATAGTTACCGGATAAGGCGCAGCGGTCGGGCTGAACGGGGGGTTCGTGCACACAGCCCAGCTTGGAG
CGAACGACCTACACCGAACTGAGATACCTACAGCGTGAGCTATGAGAAAGCGCCACGCTTCCCGAAGGGAGAA
AGGCGGACAGGTATCCGGTAAGCGGCAGGGTCGGAACAGGAGAGCGCACGAGGGAGCTTCCAGGGGGAAAC
GCCTGGTATCTTTATAGTCCTGTCGGGTTTCGCCACCTCTGACTTGAGCGTCGATTTTTGTGATGCTCGTCAGGG
GGGCGGAGCCTATGGAAAAACGCCAGCAACGCGGCCTTTTTACGGTTCCTGGCCTTTTGCTGGCCTTTTGCTCA
CATGT
pAAV-U6gRNA(Kcna1-sp_Mouse_sgRNA19)-U6gRNA(Gabra5-sp Mouse sgRNA3)-CaMKII2a ttA Tomato
used in in vivo experiments (SEQ ID NO: 6)
TAACATTATGGCCTTAGGTCACTTCATCTCCATGGGGTTCTTCTTCTGATTTTCTAGAAAATGAGATGGGGGTGCA
GAGAGCTTCCTCAGTGACCTGCCCAGGGTCACATCAGAAATGTCAGAGCTAGAACTTGAACTCAGATTACTAATC
TTAAATTCCATGCCTTGGGGGCATGCAAGTACGATATACAGAAGGAGTGAACTCATTAGGGCAGATGACCAATG
AGTTTAGGAAAGAAGAGTCCAGGGCAGGGTACATCTACACCACCCGCCCAGCCCTGGGTGAGTCCAGCCACGT
TCACCTCATTATAGTTGCCTCTCTCCAGTCCTACCTTGACGGGAAGCACAAGCAGAAACTGGGACAGGAGCCCC
AGGAGACCAAATCTTCATGGTCCCTCTGGGAGGATGGGTGGGGAGAGCTGTGGCAGAGGCCTCAGGAGGGGC
CCTGCTGCTCAGTGGTGACAGATAGGGGTGAGAAAGCAGACAGAGTCATTCCGTCAGCATTCTGGGTCTGTTTG
GTACTTCTTCTCACGCTAAGGTGGCGGTGTGATATGCACAATGGCTAAAAAGCAGGGAGAGCTGGAAAGAAACA
AGGACAGAGACAGAGGCCAAGTCAACCAGACCAATTCCCAGAGGAAGCAAAGAAACCATTACAGAGACTACAAG
GGGGAAGGGAAGGAGAGATGAATTAGCTTCCCCTGTAAACCTTAGAACCCAGCTGTTGCCAGGGCAACGGGGC
AATACCTGTCTCTTCAGAGGAGATGAAGTTGCCAGGGTAACTACATCCTGTCTTTCTCAAGGACCATCCCAGAAT
GTGGCACCCACTAGCCGTTACCATAGCAACTGCCTCTTTGCCCCACTTAATCCCATCCCGTCTGTTAAAAGGGC
CCTATAGTTGGAGGTGGGGGAGGTAGGAAGAGCGATGATCACTTGTGGACTAAGTTTGTTCGCATCCCCTTCTC
CAACCCCCTCAGTACATCACCCTGGGGGAACAGGGTCCACTTGCTCCTGGGCCCACACAGTCCTGCAGTATTGT
GTATATAAGGCCAGGGCAAAGAGGAGCAGGTTTTAAAGTGAAAGGCAGGCAGGTGTTGGGGAGGCAGTTACCG
GGGCAACGGGAACAGGGCGTTTCGGAGGTGGTTGCCATGGGGACCTGGATGCTGACGAAGGCTCGCGAGGCT
GTGAGCAGCCACAGTGCCCTGCTCAGAAGCCCCAAGCTCGTCAGTCAAGCCGGTTCTCCGTTTGCACTCAGGA
GCACGGGCAGGCGAGTGGCCCCTAGTTCTGGGGGCAGCGGTACCGCCACCATGTCTAGACTGGACAAGAGCA
AAGTCATAAACGGCGCTCTGGAATTACTCAATGGAGTCGGTATCGAAGGCCTGACGACAAGGAAACTCGCTCAA
AAGCTGGGAGTTGAGCAGCCTACCCTGTACTGGCACGTGAAGAACAAGCGGGCCCTGCTCGATGCCCTGCCAA
TCGAGATGCTGGACAGGCATCATACCCACTTCTGCCCCCTGGAAGGCGAGTCATGGCAAGACTTTCTGCGGAAC
AACGCCAAGTCATTCCGCTGTGCTCTCCTCTCACATCGCGACGGGGCTAAAGTGCATCTCGGCACCCGCCCAAC
AGAGAAACAGTACGAAACCCTGGAAAATCAGCTCGCGTTCCTGTGTCAGCAAGGCTTCTCCCTGGAGAACGCAC
TGTACGCTCTGTCCGCCGTGGGCCACTTTACACTGGGCTGCGTATTGGAGGAACAGGAGCATCAAGTAGCAAAA
GAGGAAAGAGAGACACCTACCACCGATTCTATGCCCCCACTTCTGAGACAAGCAATTGAGCTGTTCGACCGGCA
GGGAGCCGAACCTGCCTTCCTTTTCGGCCTGGAACTAATCATATGTGGCCTGGAGAAACAGCTAAAGTGCGAAA
GCGGCGGGCCGGCCGACGCCCTTGACGATTTTGACTTAGACATGCTCCCAGCCGATGCCCTTGACGACTTTGA
CCTTGATATGCTGCCTGCTGACGCTCTTGACGATTTTGACCTTGACATGCTCCCCGGGGGATCCGCTGAGGGTC
GGGGCTCTCTGCTCACATGTGGCGACGTCGAGGAGAATCCCGGACCGGCCCCGGGGTCGACAATGGTGTCTA
AGGGTGAGGAAGTAATTAAGGAGTTTATGAGATTCAAAGTTAGAATGGAGGGTAGCATGAACGGGCACGAGTTT
GAAATTGAAGGTGAGGGTGAAGGAAGACCATATGAGGGCACACAAACCGCCAAGCTCAAGGTTACCAAAGGTG
GCCCCCTTCCTTTCGCCTGGGACATCCTCAGCCCTCAATTCATGTACGGTAGCAAGGCTTACGTCAAACACCCT
GCTGATATACCTGATTACAAAAAACTGTCATTTCCTGAAGGATTTAAGTGGGAACGAGTAATGAATTTTGAGGATG
GTGGGCTGGTCACTGTCACGCAAGACTCCTCTCTGCAGGACGGCACCCTGATTTACAAGGTGAAGATGCGCGG
AACAAATTTTCCCCCCGATGGCCCCGTGATGCAGAAGAAGACCATGGGGTGGGAGGCCTCTACAGAACGACTG
TACCCCCGCGATGGCGTTCTTAAAGGCGAAATCCATCAGGCGCTTAAACTCAAAGATGGCGGGCACTACCTGGT
TGAGTTCAAAACTATATATATGGCCAAAAAGCCGGTTCAGCTGCCTGGCTACTACTACGTGGACACCAAGTTGGA
CATCACGAGTCACAACGAGGACTACACAATCGTCGAGCAGTACGAACGCTCAGAAGGTCGGCATCACCTGTTCT
TGTATGGCATGGATGAGCTGTATAAGTAAATCGATACCGAGCGCTGCTCGAGAGATCTACGGGTGGCATCCCTG
TGACCCCTCCCCAGTGCCTCTCCTGGCCCTGGAAGTTGCCACTCCAGTGCCCACCAGCCTTGTCCTAATAAAAT
TAAGTTGCATCATTTTGTCTGACTAGGTGTCCTTCTATAATATTATGGGGTGGAGGGGGGTGGTATGGAGCAAGG
GGCAAGTTGGGAAGACAACCTGTAGGGCCTGCGGGGTCTATTGGGAACCAAGCTGGAGTGCAGTGGCACAATC
TTGGCTCACTGCAATCTCCGCCTCCTGGGTTCAAGCGATTCTCCTGCCTCAGCCTCCCGAGTTGTTGGGATTCC
AGGCATGCATGACCAGGCTCAGCTAATTTTTGTTTTTTTGGTAGAGACGGGGTTTCACCATATTGGCCAGGCTGG
TCTCCAACTCCTAATCTCAGGTGATCTACCCACCTTGGCCTCCCAAATTGCTGGGATTACAGGCGTGAACCACTG
CTCCCTTCCCTGTCCTTCTGATTTTGTAGGTAACCACGTGCGGACCGAGCGGCCGCAGGAACCCCTAGTGATGG
AGTTGGCCACTCCCTCTCTGCGCGCTCGCTCGCTCACTGAGGCCGGGCGACCAAAGGTCGCCCGACGCCCGG
GCTTTGCCCGGGCGGCCTCAGTGAGCGAGCGAGCGCGCAGCTGCCTGCAGGGGCGCCTGATGCGGTATTTTC
TCCTTACGCATCTGTGCGGTATTTCACACCGCATACGTCAAAGCAACCATAGTACGCGCCCTGTAGCGGCGCAT
TAAGCGCGGCGGGTGTGGTGGTTACGCGCAGCGTGACCGCTACACTTGCCAGCGCCCTAGCGCCCGCTCCTTT
CGCTTTCTTCCCTTCCTTTCTCGCCACGTTCGCCGGCTTTCCCCGTCAAGCTCTAAATCGGGGGCTCCCTTTAGG
GTTCCGATTTAGTGCTTTACGGCACCTCGACCCCAAAAAACTTGATTTGGGTGATGGTTCACGTAGTGGGCCATC
GCCCTGATAGACGGTTTTTCGCCCTTTGACGTTGGAGTCCACGTTCTTTAATAGTGGACTCTTGTTCCAAACTGG
AACAACACTCAACCCTATCTCGGGCTATTCTTTTGATTTATAAGGGATTTTGCCGATTTCGGCCTATTGGTTAAAA
AATGAGCTGATTTAACAAAAATTTAACGCGAATTTTAACAAAATATTAACGTTTACAATTTTATGGTGCACTCTCAG
TACAATCTGCTCTGATGCCGCATAGTTAAGCCAGCCCCGACACCCGCCAACACCCGCTGACGCGCCCTGACGG
GCTTGTCTGCTCCCGGCATCCGCTTACAGACAAGCTGTGACCGTCTCCGGGAGCTGCATGTGTCAGAGGTTTTC
ACCGTCATCACCGAAACGCGCGAGACGAAAGGGCCTCGTGATACGCCTATTTTTATAGGTTAATGTCATGATAAT
AATGGTTTCTTAGACGTCAGGTGGCACTTTTCGGGGAAATGTGCGCGGAACCCCTATTTGTTTATTTTTCTAAATA
CATTCAAATATGTATCCGCTCATGAGACAATAACCCTGATAAATGCTTCAATAATATTGAAAAAGGAAGAGTATGA
GTATTCAACATTTCCGTGTCGCCCTTATTCCCTTTTTTGCGGCATTTTGCCTTCCTGTTTTTGCTCACCCAGAAAC
GCTGGTGAAAGTAAAAGATGCTGAAGATCAGTTGGGTGCACGAGTGGGTTACATCGAACTGGATCTCAACAGCG
GTAAGATCCTTGAGAGTTTTCGCCCCGAAGAACGTTTTCCAATGATGAGCACTTTTAAAGTTCTGCTATGTGGCG
CGGTATTATCCCGTATTGACGCCGGGCAAGAGCAACTCGGTCGCCGCATACACTATTCTCAGAATGACTTGGTT
GAGTACTCACCAGTCACAGAAAAGCATCTTACGGATGGCATGACAGTAAGAGAATTATGCAGTGCTGCCATAAC
CATGAGTGATAACACTGCGGCCAACTTACTTCTGACAACGATCGGAGGACCGAAGGAGCTAACCGCTTTTTTGC
ACAACATGGGGGATCATGTAACTCGCCTTGATCGTTGGGAACCGGAGCTGAATGAAGCCATACCAAACGACGAG
CGTGACACCACGATGCCTGTAGCAATGGCAACAACGTTGCGCAAACTATTAACTGGCGAACTACTTACTCTAGCT
TCCCGGCAACAATTAATAGACTGGATGGAGGCGGATAAAGTTGCAGGACCACTTCTGCGCTCGGCCCTTCCGG
CTGGCTGGTTTATTGCTGATAAATCTGGAGCCGGTGAGCGTGGGTCTCGCGGTATCATTGCAGCACTGGGGCC
AGATGGTAAGCCCTCCCGTATCGTAGTTATCTACACGACGGGGAGTCAGGCAACTATGGATGAACGAAATAGAC
AGATCGCTGAGATAGGTGCCTCACTGATTAAGCATTGGTAACTGTCAGACCAAGTTTACTCATATATACTTTAGAT
TGATTTAAAACTTCATTTTTAATTTAAAAGGATCTAGGTGAAGATCCTTTTTGATAATCTCATGACCAAAATCCCTT
AACGTGAGTTTTCGTTCCACTGAGCGTCAGACCCCGTAGAAAAGATCAAAGGATCTTCTTGAGATCCTTTTTTTCT
GCGCGTAATCTGCTGCTTGCAAACAAAAAAACCACCGCTACCAGCGGTGGTTTGTTTGCCGGATCAAGAGCTAC
CAACTCTTTTTCCGAAGGTAACTGGCTTCAGCAGAGCGCAGATACCAAATACTGTCCTTCTAGTGTAGCCGTAGT
TAGGCCACCACTTCAAGAACTCTGTAGCACCGCCTACATACCTCGCTCTGCTAATCCTGTTACCAGTGGCTGCTG
CCAGTGGCGATAAGTCGTGTCTTACCGGGTTGGACTCAAGACGATAGTTACCGGATAAGGCGCAGCGGTCGGG
CTGAACGGGGGGTTCGTGCACACAGCCCAGCTTGGAGCGAACGACCTACACCGAACTGAGATACCTACAGCGT
GAGCTATGAGAAAGCGCCACGCTTCCCGAAGGGAGAAAGGCGGACAGGTATCCGGTAAGCGGCAGGGTCGGA
ACAGGAGAGCGCACGAGGGAGCTTCCAGGGGGAAACGCCTGGTATCTTTATAGTCCTGTCGGGTTTCGCCACC
TCTGACTTGAGCGTCGATTTTTGTGATGCTCGTCAGGGGGGCGGAGCCTATGGAAAAACGCCAGCAACGCGGC
CTTTTTACGGTTCCTGGCCTTTTGCTGGCCTTTTGCTCACATGTCCTGCAGGCAGCTGCGCGCTCGCTCGCTCA
CTGAGGCCGCCCGGGCAAAGCCCGGGCGTCGGGCGACCTTTGGTCGCCCGGCCTCAGTGAGCGAGCGAGCG
CGCAGAGAGGGAGTGGCCAACTCCATCACTAGGGGTTCCTGCGGCCGCACGCGTGAGGGCCTATTTCCCATGA
TTCCTTCATATTTGCATATACGATACAAGGCTGTTAGAGAGATAATTGGAATTAATTTGACTGTAAACACAAAGATA
TTAGTACAAAATACGTGACGTAGAAAGTAATAATTTCTTGGGTAGTTTGCAGTTTTAAAATTATGTTTTAAAATGGA
CTATCATATGCTTACCGTAACTTGAAAGTATTTCGATTTCTTGGCTTTATATATCTTGTGGAAAGGACGAAACACC
AGTCAATGATCACATCCTCCGTTTTAGAGCTAGAAATAGCAAGTTAAAATAAGGCTAGTCCGTTATCAACTTGAAA
AAGTGGCACCGAGTCGGTGCTTTTTTTCTAGCTTAGAGGGCCTATTTCCCATGATTCCTTCATATTTGCATATACG
ATACAAGGCTGTTAGAGAGATAATTAGAATTAATTTGACTGTAAACACAAAGATATTAGTACAAAATACGTGACGT
AGAAAGTAATAATTTCTTGGGTAGTTTGCAGTTTTAAAATTATGTTTTAAAATGGACTATCATATGCTTACCGTAAC
TTGAAAGTATTTCGATTTCTTGGCTTTATATATCTTGTGGAAAGGACGAAACACCGAACATGGTCTTTCCCGAAGC
GTTTTAGAGCTAGAAATAGCAAGTTAAAATAAGGCTAGTCCGTTATCAACTTGAAAAAGTGGCACCGAGTCGGTG
CTTTTTTT
pAAV2-U6-gRNA(Kcna1-sp-sgRNA19)-CaMKIIA ttA Tomato used in in vivo experiments (SEQ ID NO: 7)
CCTGCAGGCAGCTGCGCGCTCGCTCGCTCACTGAGGCCGCCCGGGCAAAGCCCGGGCGTCGGGCGACCTTTG
GTCGCCCGGCCTCAGTGAGCGAGCGAGCGCGCAGAGAGGGAGTGGCCAACTCCATCACTAGGGGTTCCTGCG
GCCGCACGCGTGAGGGCCTATTTCCCATGATTCCTTCATATTTGCATATACGATACAAGGCTGTTAGAGAGATAA
TTGGAATTAATTTGACTGTAAACACAAAGATATTAGTACAAAATACGTGACGTAGAAAGTAATAATTTCTTGGGTA
GTTTGCAGTTTTAAAATTATGTTTTAAAATGGACTATCATATGCTTACCGTAACTTGAAAGTATTTCGATTTCTTGG
CTTTATATATCTTGTGGAAAGGACGAAACACCAGTCAATGATCACATCCTCCGTTTTAGAGCTAGAAATAGCAAGT
TAAAATAAGGCTAGTCCGTTATCAACTTGAAAAAGTGGCACCGAGTCGGTGCTTTTTTTCTAGCTTAATTAACATT
ATGGCCTTAGGTCACTTCATCTCCATGGGGTTCTTCTTCTGATTTTCTAGAAAATGAGATGGGGGTGCAGAGAGC
TTCCTCAGTGACCTGCCCAGGGTCACATCAGAAATGTCAGAGCTAGAACTTGAACTCAGATTACTAATCTTAAATT
CCATGCCTTGGGGGCATGCAAGTACGATATACAGAAGGAGTGAACTCATTAGGGCAGATGACCAATGAGTTTAG
GAAAGAAGAGTCCAGGGCAGGGTACATCTACACCACCCGCCCAGCCCTGGGTGAGTCCAGCCACGTTCACCTC
ATTATAGTTGCCTCTCTCCAGTCCTACCTTGACGGGAAGCACAAGCAGAAACTGGGACAGGAGCCCCAGGAGAC
CAAATCTTCATGGTCCCTCTGGGAGGATGGGTGGGGAGAGCTGTGGCAGAGGCCTCAGGAGGGGCCCTGCTG
CTCAGTGGTGACAGATAGGGGTGAGAAAGCAGACAGAGTCATTCCGTCAGCATTCTGGGTCTGTTTGGTACTTC
TTCTCACGCTAAGGTGGCGGTGTGATATGCACAATGGCTAAAAAGCAGGGAGAGCTGGAAAGAAACAAGGACA
GAGACAGAGGCCAAGTCAACCAGACCAATTCCCAGAGGAAGCAAAGAAACCATTACAGAGACTACAAGGGGGA
AGGGAAGGAGAGATGAATTAGCTTCCCCTGTAAACCTTAGAACCCAGCTGTTGCCAGGGCAACGGGGCAATACC
TGTCTCTTCAGAGGAGATGAAGTTGCCAGGGTAACTACATCCTGTCTTTCTCAAGGACCATCCCAGAATGTGGCA
CCCACTAGCCGTTACCATAGCAACTGCCTCTTTGCCCCACTTAATCCCATCCCGTCTGTTAAAAGGGCCCTATAG
TTGGAGGTGGGGGAGGTAGGAAGAGCGATGATCACTTGTGGACTAAGTTTGTTCGCATCCCCTTCTCCAACCCC
CTCAGTACATCACCCTGGGGGAACAGGGTCCACTTGCTCCTGGGCCCACACAGTCCTGCAGTATTGTGTATATA
AGGCCAGGGCAAAGAGGAGCAGGTTTTAAAGTGAAAGGCAGGCAGGTGTTGGGGAGGCAGTTACCGGGGCAA
CGGGAACAGGGCGTTTCGGAGGTGGTTGCCATGGGGACCTGGATGCTGACGAAGGCTCGCGAGGCTGTGAGC
AGCCACAGTGCCCTGCTCAGAAGCCCCAAGCTCGTCAGTCAAGCCGGTTCTCCGTTTGCACTCAGGAGCACGG
GCAGGCGAGTGGCCCCTAGTTCTGGGGGCAGCGGTACCGCCACCATGTCTAGACTGGACAAGAGCAAAGTCAT
AAACGGCGCTCTGGAATTACTCAATGGAGTCGGTATCGAAGGCCTGACGACAAGGAAACTCGCTCAAAAGCTGG
GAGTTGAGCAGCCTACCCTGTACTGGCACGTGAAGAACAAGCGGGCCCTGCTCGATGCCCTGCCAATCGAGAT
GCTGGACAGGCATCATACCCACTTCTGCCCCCTGGAAGGCGAGTCATGGCAAGACTTTCTGCGGAACAACGCC
AAGTCATTCCGCTGTGCTCTCCTCTCACATCGCGACGGGGCTAAAGTGCATCTCGGCACCCGCCCAACAGAGAA
ACAGTACGAAACCCTGGAAAATCAGCTCGCGTTCCTGTGTCAGCAAGGCTTCTCCCTGGAGAACGCACTGTACG
CTCTGTCCGCCGTGGGCCACTTTACACTGGGCTGCGTATTGGAGGAACAGGAGCATCAAGTAGCAAAAGAGGA
AAGAGAGACACCTACCACCGATTCTATGCCCCCACTTCTGAGACAAGCAATTGAGCTGTTCGACCGGCAGGGAG
CCGAACCTGCCTTCCTTTTCGGCCTGGAACTAATCATATGTGGCCTGGAGAAACAGCTAAAGTGCGAAAGCGGC
GGGCCGGCCGACGCCCTTGACGATTTTGACTTAGACATGCTCCCAGCCGATGCCCTTGACGACTTTGACCTTGA
TATGCTGCCTGCTGACGCTCTTGACGATTTTGACCTTGACATGCTCCCCGGGGGATCCGCTGAGGGTCGGGGC
TCTCTGCTCACATGTGGCGACGTCGAGGAGAATCCCGGACCGGCCCCGGGGTCGACAATGGTGTCTAAGGGTG
AGGAAGTAATTAAGGAGTTTATGAGATTCAAAGTTAGAATGGAGGGTAGCATGAACGGGCACGAGTTTGAAATTG
AAGGTGAGGGTGAAGGAAGACCATATGAGGGCACACAAACCGCCAAGCTCAAGGTTACCAAAGGTGGCCCCCT
TCCTTTCGCCTGGGACATCCTCAGCCCTCAATTCATGTACGGTAGCAAGGCTTACGTCAAACACCCTGCTGATAT
ACCTGATTACAAAAAACTGTCATTTCCTGAAGGATTTAAGTGGGAACGAGTAATGAATTTTGAGGATGGTGGGCT
GGTCACTGTCACGCAAGACTCCTCTCTGCAGGACGGCACCCTGATTTACAAGGTGAAGATGCGCGGAACAAATT
TTCCCCCCGATGGCCCCGTGATGCAGAAGAAGACCATGGGGTGGGAGGCCTCTACAGAACGACTGTACCCCCG
CGATGGCGTTCTTAAAGGCGAAATCCATCAGGCGCTTAAACTCAAAGATGGCGGGCACTACCTGGTTGAGTTCA
AAACTATATATATGGCCAAAAAGCCGGTTCAGCTGCCTGGCTACTACTACGTGGACACCAAGTTGGACATCACGA
GTCACAACGAGGACTACACAATCGTCGAGCAGTACGAACGCTCAGAAGGTCGGCATCACCTGTTCTTGTATGGC
ATGGATGAGCTGTATAAGTAAATCGATACCGAGCGCTGCTCGAGAGATCTACGGGTGGCATCCCTGTGACCCCT
CCCCAGTGCCTCTCCTGGCCCTGGAAGTTGCCACTCCAGTGCCCACCAGCCTTGTCCTAATAAAATTAAGTTGC
ATCATTTTGTCTGACTAGGTGTCCTTCTATAATATTATGGGGTGGAGGGGGGTGGTATGGAGCAAGGGGCAAGT
TGGGAAGACAACCTGTAGGGCCTGCGGGGTCTATTGGGAACCAAGCTGGAGTGCAGTGGCACAATCTTGGCTC
ACTGCAATCTCCGCCTCCTGGGTTCAAGCGATTCTCCTGCCTCAGCCTCCCGAGTTGTTGGGATTCCAGGCATG
CATGACCAGGCTCAGCTAATTTTTGTTTTTTTGGTAGAGACGGGGTTTCACCATATTGGCCAGGCTGGTCTCCAA
CTCCTAATCTCAGGTGATCTACCCACCTTGGCCTCCCAAATTGCTGGGATTACAGGCGTGAACCACTGCTCCCTT
CCCTGTCCTTCTGATTTTGTAGGTAACCACGTGCGGACCGAGCGGCCGCAGGAACCCCTAGTGATGGAGTTGG
CCACTCCCTCTCTGCGCGCTCGCTCGCTCACTGAGGCCGGGCGACCAAAGGTCGCCCGACGCCCGGGCTTTG
CCCGGGCGGCCTCAGTGAGCGAGCGAGCGCGCAGCTGCCTGCAGGGGCGCCTGATGCGGTATTTTCTCCTTA
CGCATCTGTGCGGTATTTCACACCGCATACGTCAAAGCAACCATAGTACGCGCCCTGTAGCGGCGCATTAAGCG
CGGCGGGTGTGGTGGTTACGCGCAGCGTGACCGCTACACTTGCCAGCGCCCTAGCGCCCGCTCCTTTCGCTTT
CTTCCCTTCCTTTCTCGCCACGTTCGCCGGCTTTCCCCGTCAAGCTCTAAATCGGGGGCTCCCTTTAGGGTTCC
GATTTAGTGCTTTACGGCACCTCGACCCCAAAAAACTTGATTTGGGTGATGGTTCACGTAGTGGGCCATCGCCC
TGATAGACGGTTTTTCGCCCTTTGACGTTGGAGTCCACGTTCTTTAATAGTGGACTCTTGTTCCAAACTGGAACA
ACACTCAACCCTATCTCGGGCTATTCTTTTGATTTATAAGGGATTTTGCCGATTTCGGCCTATTGGTTAAAAAATG
AGCTGATTTAACAAAAATTTAACGCGAATTTTAACAAAATATTAACGTTTACAATTTTATGGTGCACTCTCAGTACA
ATCTGCTCTGATGCCGCATAGTTAAGCCAGCCCCGACACCCGCCAACACCCGCTGACGCGCCCTGACGGGCTT
GTCTGCTCCCGGCATCCGCTTACAGACAAGCTGTGACCGTCTCCGGGAGCTGCATGTGTCAGAGGTTTTCACCG
TCATCACCGAAACGCGCGAGACGAAAGGGCCTCGTGATACGCCTATTTTTATAGGTTAATGTCATGATAATAATG
GTTTCTTAGACGTCAGGTGGCACTTTTCGGGGAAATGTGCGCGGAACCCCTATTTGTTTATTTTTCTAAATACATT
CAAATATGTATCCGCTCATGAGACAATAACCCTGATAAATGCTTCAATAATATTGAAAAAGGAAGAGTATGAGTAT
TCAACATTTCCGTGTCGCCCTTATTCCCTTTTTTGCGGCATTTTGCCTTCCTGTTTTTGCTCACCCAGAAACGCTG
GTGAAAGTAAAAGATGCTGAAGATCAGTTGGGTGCACGAGTGGGTTACATCGAACTGGATCTCAACAGCGGTAA
GATCCTTGAGAGTTTTCGCCCCGAAGAACGTTTTCCAATGATGAGCACTTTTAAAGTTCTGCTATGTGGCGCGGT
ATTATCCCGTATTGACGCCGGGCAAGAGCAACTCGGTCGCCGCATACACTATTCTCAGAATGACTTGGTTGAGT
ACTCACCAGTCACAGAAAAGCATCTTACGGATGGCATGACAGTAAGAGAATTATGCAGTGCTGCCATAACCATGA
GTGATAACACTGCGGCCAACTTACTTCTGACAACGATCGGAGGACCGAAGGAGCTAACCGCTTTTTTGCACAAC
ATGGGGGATCATGTAACTCGCCTTGATCGTTGGGAACCGGAGCTGAATGAAGCCATACCAAACGACGAGCGTG
ACACCACGATGCCTGTAGCAATGGCAACAACGTTGCGCAAACTATTAACTGGCGAACTACTTACTCTAGCTTCCC
GGCAACAATTAATAGACTGGATGGAGGCGGATAAAGTTGCAGGACCACTTCTGCGCTCGGCCCTTCCGGCTGG
CTGGTTTATTGCTGATAAATCTGGAGCCGGTGAGCGTGGGTCTCGCGGTATCATTGCAGCACTGGGGCCAGATG
GTAAGCCCTCCCGTATCGTAGTTATCTACACGACGGGGAGTCAGGCAACTATGGATGAACGAAATAGACAGATC
GCTGAGATAGGTGCCTCACTGATTAAGCATTGGTAACTGTCAGACCAAGTTTACTCATATATACTTTAGATTGATT
TAAAACTTCATTTTTAATTTAAAAGGATCTAGGTGAAGATCCTTTTTGATAATCTCATGACCAAAATCCCTTAACGT
GAGTTTTCGTTCCACTGAGCGTCAGACCCCGTAGAAAAGATCAAAGGATCTTCTTGAGATCCTTTTTTTCTGCGC
GTAATCTGCTGCTTGCAAACAAAAAAACCACCGCTACCAGCGGTGGTTTGTTTGCCGGATCAAGAGCTACCAACT
CTTTTTCCGAAGGTAACTGGCTTCAGCAGAGCGCAGATACCAAATACTGTCCTTCTAGTGTAGCCGTAGTTAGGC
CACCACTTCAAGAACTCTGTAGCACCGCCTACATACCTCGCTCTGCTAATCCTGTTACCAGTGGCTGCTGCCAGT
GGCGATAAGTCGTGTCTTACCGGGTTGGACTCAAGACGATAGTTACCGGATAAGGCGCAGCGGTCGGGCTGAA
CGGGGGGTTCGTGCACACAGCCCAGCTTGGAGCGAACGACCTACACCGAACTGAGATACCTACAGCGTGAGCT
ATGAGAAAGCGCCACGCTTCCCGAAGGGAGAAAGGCGGACAGGTATCCGGTAAGCGGCAGGGTCGGAACAGG
AGAGCGCACGAGGGAGCTTCCAGGGGGAAACGCCTGGTATCTTTATAGTCCTGTCGGGTTTCGCCACCTCTGA
CTTGAGCGTCGATTTTTGTGATGCTCGTCAGGGGGGCGGAGCCTATGGAAAAACGCCAGCAACGCGGCCTTTTT
ACGGTTCCTGGCCTTTTGCTGGCCTTTTGCTCACATGT
pKLV-U6gRNA(Gabra5-sp_sgRNA1) used in in vitro for qPCR experiments (SEQ ID NO: 8)
CTAAATTGTAAGCGTTAATATTTTGTTAAAATTCGCGTTAAATTTTTGTTAAATCAGCTCATTTTTTAACCAATAGGC
CGAAATCGGCAAAATCCCTTATAAATCAAAAGAATAGACCGAGATAGGGTTGAGTGTTGTTCCAGTTTGGAACAA
GAGTCCACTATTAAAGAACGTGGACTCCAACGTCAAAGGGCGAAAAACCGTCTATCAGGGCGATGGCCCACTAC
GTGAACCATCACCCTAATCAAGTTTTTTGGGGTCGAGGTGCCGTAAAGCACTAAATCGGAACCCTAAAGGGAGC
CCCCGATTTAGAGCTTGACGGGGAAAGCCGGCGAACGTGGCGAGAAAGGAAGGGAAGAAAGCGAAAGGAGCG
GGCGCTAGGGCGCTGGCAAGTGTAGCGGTCACGCTGCGCGTAACCACCACACCCGCCGCGCTTAATGCGCCG
CTACAGGGCGCGTCCCATTCGCCATTCAGGCTGCGCAACTGTTGGGAAGGGCGATCGGTGCGGGCCTCTTCGC
TATTACGCCAGCTGGCGAAAGGGGGATGTGCTGCAAGGCGATTAAGTTGGGTAACGCCAGGGTTTTCCCAGTC
ACGACGTTGTAAAACGACGGCCAGTGAGCGCGCGTAATACGACTCACTATAGGGCGAATTGACTAGTTATTAAT
AGTAATCAATTACGGGGTCATTAGTTCATAGCCCATATATGGAGTTCCGCGTTACATAACTTACGGTAAATGGCC
CGCCTGGCTGACCGCCCAACGACCCCCGCCCATTGACGTCAATAATGACGTATGTTCCCATAGTAACGCCAATA
GGGACTTTCCATTGACGTCAATGGGTGGAGTATTTACGGTAAACTGCCCACTTGGCAGTACATCAAGTGTATCAT
ATGCCAAGTACGCCCCCTATTGACGTCAATGACGGTAAATGGCCCGCCTGGCATTATGCCCAGTACATGACCTT
ATGGGACTTTCCTACTTGGCAGTACATCTACGTATTAGTCATCGCTATTACCATGGTGATGCGGTTTTGGCAGTA
CATCAATGGGCGTGGATAGCGGTTTGACTCACGGGGATTTCCAAGTCTCCACCCCATTGACGTCAATGGGAGTT
TGTTTTGGCACCAAAATCAACGGGACTTTCCAAAATGTCGTAACAACTCCGCCCCATTGACGCAAATGGGCGGTA
GGCGTGTACGGTGGGAGGTCTATATAAGCAGCGCGTTTTGCCTGTACTGGGTCTCTCTGGTTAGACCAGATCTG
AGCCTGGGAGCTCTCTGGCTAACTAGGGAACCCACTGCTTAAGCCTCAATAAAGCTTGCCTTGAGTGCTTCAAG
TAGTGTGTGCCCGTCTGTTGTGTGACTCTGGTAACTAGAGATCCCTCAGACCCTTTTAGTCAGTGTGGAAAATCT
CTAGCAGTGGCGCCCGAACAGGGACTTGAAAGCGAAAGGGAAACCAGAGGAGCTCTCTCGACGCAGGACTCG
GCTTGCTGAAGCGCGCACGGCAAGAGGCGAGGGGCGGCGACTGGTGAGTACGCCAAAAATTTTGACTAGCGG
AGGCTAGAAGGAGAGAGATGGGTGCGAGAGCGTCAGTATTAAGCGGGGGAGAATTAGATCGCGATGGGAAAAA
ATTCGGTTAAGGCCAGGGGGAAAGAAAAAATATAAATTAAAACATATAGTATGGGCAAGCAGGGAGCTAGAACG
ATTCGCAGTTAATCCTGGCCTGTTAGAAACATCAGAAGGCTGTAGACAAATACTGGGACAGCTACAACCATCCCT
TCAGACAGGATCAGAAGAACTTAGATCATTATATAATACAGTAGCAACCCTCTATTGTGTGCATCAAAGGATAGA
GATAAAAGACACCAAGGAAGCTTTAGACAAGATAGAGGAAGAGCAAAACAAAAGTAAGACCACCGCACAGCAAG
CGGCCGGCCGCGCTGATCTTCAGACCTGGAGGAGGAGATATGAGGGACAATTGGAGAAGTGAATTATATAAATA
TAAAGTAGTAAAAATTGAACCATTAGGAGTAGCACCCACCAAGGCAAAGAGAAGAGTGGTGCAGAGAGAAAAAA
GAGCAGTGGGAATAGGAGCTTTGTTCCTTGGGTTCTTGGGAGCAGCAGGAAGCACTATGGGCGCAGCGTCAAT
GACGCTGACGGTACAGGCCAGACAATTATTGTCTGGTATAGTGCAGCAGCAGAACAATTTGCTGAGGGCTATTG
AGGCGCAACAGCATCTGTTGCAACTCACAGTCTGGGGCATCAAGCAGCTCCAGGCAAGAATCCTGGCTGTGGA
AAGATACCTAAAGGATCAACAGCTCCTGGGGATTTGGGGTTGCTCTGGAAAACTCATTTGCACCACTGCTGTGC
CTTGGAATGCTAGTTGGAGTAATAAATCTCTGGAACAGATTTGGAATCACACGACCTGGATGGAGTGGGACAGA
GAAATTAACAATTACACAAGCTTAATACACTCCTTAATTGAAGAATCGCAAAACCAGCAAGAAAAGAATGAACAAG
AATTATTGGAATTAGATAAATGGGCAAGTTTGTGGAATTGGTTTAACATAACAAATTGGCTGTGGTATATAAAATTA
TTCATAATGATAGTAGGAGGCTTGGTAGGTTTAAGAATAGTTTTTGCTGTACTTTCTATAGTGAATAGAGTTAGGC
AGGGATATTCACCATTATCGTTTCAGACCCACCTCCCAACCCCGAGGGGACCCGACAGGCCCGAAGGAATAGAA
GAAGAAGGTGGAGAGAGAGACAGAGACAGATCCATTCGATTAGTGAACGGATCGGCACTGCGTGCGCCAATTC
TGCAGACAAATGGCAGTATTCATCCACAATTTTAAAAGAAAAGGGGGGATTGGGGGGTACAGTGCAGGGGAAAG
AATAGTAGACATAATAGCAACAGACATACAAACTAAAGAATTACAAAAACAAATTACAAAAATTCAAAATTTTCGGG
TTTATTACAGGGACAGCAGAGATCCAGTTTGGTTAGTACCGGGCCCTACGCGTTACTCGAGCCAAGGTCGGGCA
GGAAGAGGGCCTATTTCCCATGATTCCTTCATATTTGCATATACGATACAAGGCTGTTAGAGAGATAATTAGAATT
AATTTGACTGTAAACACAAAGATATTAGTACAAAATACGTGACGTAGAAAGTAATAATTTCTTGGGTAGTTTGCAG
TTTTAAAATTATGTTTTAAAATGGACTATCATATGCTTACCGTAACTTGAAAGTATTTCGATTTCTTGGCTTTATATA
TCTTGTGGAAAGGACGAAACACCGAGCGAGCGCGAGTCCGCCGGTTTTAGAGCTAGAAATAGCAAGTTAAAATA
AGGCTAGTCCGTTATCAACTTGAAAAAGTGGCACCGAGTCGGTGCTTTTTTTGGATCCAATTCTACCGGGTAGGG
GAGGCGCTTTTCCCAAGGCAGTCTGGAGCATGCGCTTTAGCAGCCCCGCTGGGCACTTGGCGCTACACAAGTG
GCCTCTGGCCTCGCACACATTCCACATCCACCGGTAGGCGCCAACCGGCTCCGTTCTTTGGTGGCCCCTTCGC
GCCACCTTCTACTCCTCCCCTAGTCAGGAAGTTCCCCCCCGCCCCGCAGCTCGCGTCGTGCAGGACGTGACAA
ATGGAAGTAGCACGTCTCACTAGTCTCGTGCAGATGGACAGCACCGCTGAGCAATGGAAGCGGGTAGGCCTTT
GGGGCAGCGGCCAATAGCAGCTTTGCTCCTTCGCTTTCTGGGCTCAGAGGCTGGGAAGGGGTGGGTCCGGGG
GCGGGCTCAGGGGGGGGCTCAGGGGCGGGGGGGGCGCCCGAAGGTCCTCCGGAGGCCCGGCATTCTGCAC
GCTTCAAAAGCGCACGTCTGCCGCGCTGTTCTCCTCTTCCTCATCTCCGGGCCTTTCGACCTGCATCCATCTAG
ATCTCGAGCAGCTGAAGCTTACCATGACCGAGTACAAGCCCACGGTGCGCCTCGCCACCCGCGACGACGTCCC
CAGGGCCGTACGCACCCTCGCCGCCGCGTTCGCCGACTACCCCGCCACGCGCCACACCGTCGATCCGGACCG
CCACATCGAGCGGGTCACCGAGCTGCAAGAACTCTTCCTCACGCGCGTCGGGCTCGACATCGGCAAGGTGTGG
GTCGCGGACGACGGCGCCGCGGTGGCGGTCTGGACCACGCCGGAGAGCGTCGAAGCGGGGGCGGTGTTCGC
CGAGATCGGCCCGCGCATGGCCGAGTTGAGCGGTTCCCGGCTGGCCGCGCAGCAACAGATGGAAGGCCTCCT
GGCGCCGCACCGGCCCAAGGAGCCCGCGTGGTTCCTGGCCACCGTCGGCGTCTCGCCCGACCACCAGGGCA
AGGGTCTGGGCAGCGCCGTCGTGCTCCCCGGAGTGGAGGCGGCCGAGCGCGCCGGGGTGCCCGCCTTCCTG
GAGACCTCCGCGCCCCGCAACCTCCCCTTCTACGAGCGGCTCGGCTTCACCGTCACCGCCGACGTCGAGGTG
CCCGAAGGACCGCGCACCTGGTGCATGACCCGCAAGCCCGGTGCCGGCGGCGGGTCCGGAGGAGAGGGCAG
AGGAAGTCTCCTAACATGCGGTGACGTGGAGGAGAATCCTGGCCCAATGAGCGAGCTGATTAAGGAGAACATG
CACATGAAGCTGTACATGGAGGGCACCGTGGACAACCATCACTTCAAGTGCACATCCGAGGGCGAAGGCAAGC
CCTACGAGGGCACCCAGACCATGAGAATCAAGGTGGTCGAGGGCGGCCCTCTCCCCTTCGCCTTCGACATCCT
GGCTACTAGCTTCCTCTACGGCAGCAAGACCTTCATCAACCACACCCAGGGCATCCCCGACTTCTTCAAGCAGT
CCTTCCCTGAGGGCTTCACATGGGAGAGAGTCACCACATACGAGGACGGGGGCGTGCTGACCGCTACCCAGGA
CACCAGCCTCCAGGACGGCTGCCTCATCTACAACGTCAAGATCAGAGGGGTGAACTTCACATCCAACGGCCCT
GTGATGCAGAAGAAAACACTCGGCTGGGAGGCCTTCACCGAGACGCTGTACCCCGCTGACGGCGGCCTGGAA
GGCAGAAACGACATGGCCCTGAAGCTCGTGGGCGGGAGCCATCTGATCGCAAACATCAAGACCACATATAGAT
CCAAGAAACCCGCTAAGAACCTCAAGATGCCTGGCGTCTACTATGTGGACTACAGACTGGAAAGAATCAAGGAG
GCCAACAACGAGACCTACGTCGAGCAGCACGAGGTGGCAGTGGCCAGATACTGCGACCTCCCTAGCAAACTGG
GGCACAAGCTTAATTGAGCGGCCGCTAGGTACCTTTAAGACCAATGACTTACAAGGCAGCTGTAGATCTTAGCC
ACTTTTTAAAAGAAAAGGGGGGACTGGAAGGGCTAATTCACTCCCAAAGAAGTCAAGATCTGCTTTTTGCCTGTA
CTGGGTCTCTCTGGTTAGACCAGAGTCTCTCTGGTTAGACCAGATCTGAGCCTGGGAGCTCTCTGGCTAACTAG
GGAACCCACTGCTTAAGCCTCAATAAAGCTTGCCTTGAGTGCTTCAAGTAGTGTGTGCCCGTCTGTTGTGTGACT
CTGGTAACTAGAGATCCCTCAGACCCTTTTAGTCAGTGTGGAAAATCTCTAGCAGTTTAAACCCGCTGATCAGCC
TCGACTGTGCCTTCTAGTTGCCAGCCATCTGTTGTTTGCCCCTCCCCCGTGCCTTCCTTGACCCTGGAAGGTGC
CACTCCCACTGTCCTTTCCTAATAAAATGAGGAAATTGCATCGCATTGTCTGAGTAGGTGTCATTCTATTCTGGG
GGGTGGGGTGGGGCAGGACAGCAAGGGGGAGGATTGGGAAGTCAATAGCAGGCATGCTGGGGATGCGGTGG
GCTCTATGGGCGGCCGTTAATTAAGCTTTTGTTCCCTTTAGTGAGGGTTAATTGCGCGCTTGGCGTAATCATGGT
CATAGCTGTTTCCTGTGTGAAATTGTTATCCGCTCACAATTCCACACAACATACGAGCCGGAAGCATAAAGTGTA
AAGCCTGGGGTGCCTAATGAGTGAGCTAACTCACATTAATTGCGTTGCGCTCACTGCCCGCTTTCCAGTCGGGA
AACCTGTCGTGCCAGCTGCATTAATGAATCGGCCAACGCGCGGGGAGAGGCGGTTTGCGTATTGGGCGCTCTT
CCGCTTCCTCGCTCACTGACTCGCTGCGCTCGGTCGTTCGGCTGCGGCGAGCGGTATCAGCTCACTCAAAGGC
GGTAATACGGTTATCCACAGAATCAGGGGATAACGCAGGAAAGAACATGTGAGCAAAAGGCCAGCAAAAGGCCA
GGAACCGTAAAAAGGCCGCGTTGCTGGCGTTTTTCCATAGGCTCCGCCCCCCTGACGAGCATCACAAAAATCGA
CGCTCAAGTCAGAGGTGGCGAAACCCGACAGGACTATAAAGATACCAGGCGTTTCCCCCTGGAAGCTCCCTCG
TGCGCTCTCCTGTTCCGACCCTGCCGCTTACCGGATACCTGTCCGCCTTTCTCCCTTCGGGAAGCGTGGCGCTT
TCTCATAGCTCACGCTGTAGGTATCTCAGTTCGGTGTAGGTCGTTCGCTCCAAGCTGGGCTGTGTGCACGAACC
CCCCGTTCAGCCCGACCGCTGCGCCTTATCCGGTAACTATCGTCTTGAGTCCAACCCGGTAAGACACGACTTAT
CGCCACTGGCAGCAGCCACTGGTAACAGGATTAGCAGAGCGAGGTATGTAGGCGGTGCTACAGAGTTCTTGAA
GTGGTGGCCTAACTACGGCTACACTAGAAGGACAGTATTTGGTATCTGCGCTCTGCTGAAGCCAGTTACCTTCG
GAAAAAGAGTTGGTAGCTCTTGATCCGGCAAACAAACCACCGCTGGTAGCGGTGGTTTTTTTGTTTGCAAGCAG
CAGATTACGCGCAGAAAAAAAGGATCTCAAGAAGATCCTTTGATCTTTTCTACGGGGTCTGACGCTCAGTGGAAC
GAAAACTCACGTTAAGGGATTTTGGTCATGAGATTATCAAAAAGGATCTTCACCTAGATCCTTTTAAATTAAAAAT
GAAGTTTTAAATCAATCTAAAGTATATATGAGTAAACTTGGTCTGACAGTTACCAATGCTTAATCAGTGAGGCACC
TATCTCAGCGATCTGTCTATTTCGTTCATCCATAGTTGCCTGACTCCCCGTCGTGTAGATAACTACGATACGGGA
GGGCTTACCATCTGGCCCCAGTGCTGCAATGATACCGCGAGACCCACGCTCACCGGCTCCAGATTTATCAGCAA
TAAACCAGCCAGCCGGAAGGGCCGAGCGCAGAAGTGGTCCTGCAACTTTATCCGCCTCCATCCAGTCTATTAAT
TGTTGCCGGGAAGCTAGAGTAAGTAGTTCGCCAGTTAATAGTTTGCGCAACGTTGTTGCCATTGCTACAGGCATC
GTGGTGTCACGCTCGTCGTTTGGTATGGCTTCATTCAGCTCCGGTTCCCAACGATCAAGGCGAGTTACATGATC
CCCCATGTTGTGCAAAAAAGCGGTTAGCTCCTTCGGTCCTCCGATCGTTGTCAGAAGTAAGTTGGCCGCAGTGT
TATCACTCATGGTTATGGCAGCACTGCATAATTCTCTTACTGTCATGCCATCCGTAAGATGCTTTTCTGTGACTGG
TGAGTACTCAACCAAGTCATTCTGAGAATAGTGTATGCGGCGACCGAGTTGCTCTTGCCCGGCGTCAATACGGG
ATAATACCGCGCCACATAGCAGAACTTTAAAAGTGCTCATCATTGGAAAACGTTCTTCGGGGCGAAAACTCTCAA
GGATCTTACCGCTGTTGAGATCCAGTTCGATGTAACCCACTCGTGCACCCAACTGATCTTCAGCATCTTTTACTTT
CACCAGCGTTTCTGGGTGAGCAAAAACAGGAAGGCAAAATGCCGCAAAAAAGGGAATAAGGGCGACACGGAAA
TGTTGAATACTCATACTCTTCCTTTTTCAATATTATTGAAGCATTTATCAGGGTTATTGTCTCATGAGCGGATACAT
ATTTGAATGTATTTAGAAAAATAAACAAATAGGGGTTCCGCGCACATTTCCCCGAAAAGTGCCAC
pKLV-U6gRNA(Gabra5-sp_sgRNA2) used in vitro for qPCT experiments (SEQ ID NO: 9)
CTAAATTGTAAGCGTTAATATTTTGTTAAAATTCGCGTTAAATTTTTGTTAAATCAGCTCATTTTTTAACCAATAGGC
CGAAATCGGCAAAATCCCTTATAAATCAAAAGAATAGACCGAGATAGGGTTGAGTGTTGTTCCAGTTTGGAACAA
GAGTCCACTATTAAAGAACGTGGACTCCAACGTCAAAGGGCGAAAAACCGTCTATCAGGGCGATGGCCCACTAC
GTGAACCATCACCCTAATCAAGTTTTTTGGGGTCGAGGTGCCGTAAAGCACTAAATCGGAACCCTAAAGGGAGC
CCCCGATTTAGAGCTTGACGGGGAAAGCCGGCGAACGTGGCGAGAAAGGAAGGGAAGAAAGCGAAAGGAGCG
GGCGCTAGGGCGCTGGCAAGTGTAGCGGTCACGCTGCGCGTAACCACCACACCCGCCGCGCTTAATGCGCCG
CTACAGGGCGCGTCCCATTCGCCATTCAGGCTGCGCAACTGTTGGGAAGGGCGATCGGTGCGGGCCTCTTCGC
TATTACGCCAGCTGGCGAAAGGGGGATGTGCTGCAAGGCGATTAAGTTGGGTAACGCCAGGGTTTTCCCAGTC
ACGACGTTGTAAAACGACGGCCAGTGAGCGCGCGTAATACGACTCACTATAGGGCGAATTGACTAGTTATTAAT
AGTAATCAATTACGGGGTCATTAGTTCATAGCCCATATATGGAGTTCCGCGTTACATAACTTACGGTAAATGGCC
CGCCTGGCTGACCGCCCAACGACCCCCGCCCATTGACGTCAATAATGACGTATGTTCCCATAGTAACGCCAATA
GGGACTTTCCATTGACGTCAATGGGTGGAGTATTTACGGTAAACTGCCCACTTGGCAGTACATCAAGTGTATCAT
ATGCCAAGTACGCCCCCTATTGACGTCAATGACGGTAAATGGCCCGCCTGGCATTATGCCCAGTACATGACCTT
ATGGGACTTTCCTACTTGGCAGTACATCTACGTATTAGTCATCGCTATTACCATGGTGATGCGGTTTTGGCAGTA
CATCAATGGGCGTGGATAGCGGTTTGACTCACGGGGATTTCCAAGTCTCCACCCCATTGACGTCAATGGGAGTT
TGTTTTGGCACCAAAATCAACGGGACTTTCCAAAATGTCGTAACAACTCCGCCCCATTGACGCAAATGGGCGGTA
GGCGTGTACGGTGGGAGGTCTATATAAGCAGCGCGTTTTGCCTGTACTGGGTCTCTCTGGTTAGACCAGATCTG
AGCCTGGGAGCTCTCTGGCTAACTAGGGAACCCACTGCTTAAGCCTCAATAAAGCTTGCCTTGAGTGCTTCAAG
TAGTGTGTGCCCGTCTGTTGTGTGACTCTGGTAACTAGAGATCCCTCAGACCCTTTTAGTCAGTGTGGAAAATCT
CTAGCAGTGGCGCCCGAACAGGGACTTGAAAGCGAAAGGGAAACCAGAGGAGCTCTCTCGACGCAGGACTCG
GCTTGCTGAAGCGCGCACGGCAAGAGGCGAGGGGCGGCGACTGGTGAGTACGCCAAAAATTTTGACTAGCGG
AGGCTAGAAGGAGAGAGATGGGTGCGAGAGCGTCAGTATTAAGCGGGGGAGAATTAGATCGCGATGGGAAAAA
ATTCGGTTAAGGCCAGGGGGAAAGAAAAAATATAAATTAAAACATATAGTATGGGCAAGCAGGGAGCTAGAACG
ATTCGCAGTTAATCCTGGCCTGTTAGAAACATCAGAAGGCTGTAGACAAATACTGGGACAGCTACAACCATCCCT
TCAGACAGGATCAGAAGAACTTAGATCATTATATAATACAGTAGCAACCCTCTATTGTGTGCATCAAAGGATAGA
GATAAAAGACACCAAGGAAGCTTTAGACAAGATAGAGGAAGAGCAAAACAAAAGTAAGACCACCGCACAGCAAG
CGGCCGGCCGCGCTGATCTTCAGACCTGGAGGAGGAGATATGAGGGACAATTGGAGAAGTGAATTATATAAATA
TAAAGTAGTAAAAATTGAACCATTAGGAGTAGCACCCACCAAGGCAAAGAGAAGAGTGGTGCAGAGAGAAAAAA
GAGCAGTGGGAATAGGAGCTTTGTTCCTTGGGTTCTTGGGAGCAGCAGGAAGCACTATGGGCGCAGCGTCAAT
GACGCTGACGGTACAGGCCAGACAATTATTGTCTGGTATAGTGCAGCAGCAGAACAATTTGCTGAGGGCTATTG
AGGCGCAACAGCATCTGTTGCAACTCACAGTCTGGGGCATCAAGCAGCTCCAGGCAAGAATCCTGGCTGTGGA
AAGATACCTAAAGGATCAACAGCTCCTGGGGATTTGGGGTTGCTCTGGAAAACTCATTTGCACCACTGCTGTGC
CTTGGAATGCTAGTTGGAGTAATAAATCTCTGGAACAGATTTGGAATCACACGACCTGGATGGAGTGGGACAGA
GAAATTAACAATTACACAAGCTTAATACACTCCTTAATTGAAGAATCGCAAAACCAGCAAGAAAAGAATGAACAAG
AATTATTGGAATTAGATAAATGGGCAAGTTTGTGGAATTGGTTTAACATAACAAATTGGCTGTGGTATATAAAATTA
TTCATAATGATAGTAGGAGGCTTGGTAGGTTTAAGAATAGTTTTTGCTGTACTTTCTATAGTGAATAGAGTTAGGC
AGGGATATTCACCATTATCGTTTCAGACCCACCTCCCAACCCCGAGGGGACCCGACAGGCCCGAAGGAATAGAA
GAAGAAGGTGGAGAGAGAGACAGAGACAGATCCATTCGATTAGTGAACGGATCGGCACTGCGTGCGCCAATTC
TGCAGACAAATGGCAGTATTCATCCACAATTTTAAAAGAAAAGGGGGGATTGGGGGGTACAGTGCAGGGGAAAG
AATAGTAGACATAATAGCAACAGACATACAAACTAAAGAATTACAAAAACAAATTACAAAAATTCAAAATTTTCGGG
TTTATTACAGGGACAGCAGAGATCCAGTTTGGTTAGTACCGGGCCCTACGCGTTACTCGAGCCAAGGTCGGGCA
GGAAGAGGGCCTATTTCCCATGATTCCTTCATATTTGCATATACGATACAAGGCTGTTAGAGAGATAATTAGAATT
AATTTGACTGTAAACACAAAGATATTAGTACAAAATACGTGACGTAGAAAGTAATAATTTCTTGGGTAGTTTGCAG
TTTTAAAATTATGTTTTAAAATGGACTATCATATGCTTACCGTAACTTGAAAGTATTTCGATTTCTTGGCTTTATATA
TCTTGTGGAAAGGACGAAAcaccGGTGACTAGCGATTATTCCAgtTTTAGAGCTAGAAATAGCAAGTTAAAATAAGG
CTAGTCCGTTATCAACTTGAAAAAGTGGCACCGAGTCGGTGCTTTTTTTGGATCCAATTCTACCGGGTAGGGGAG
GCGCTTTTCCCAAGGCAGTCTGGAGCATGCGCTTTAGCAGCCCCGCTGGGCACTTGGCGCTACACAAGTGGCC
TCTGGCCTCGCACACATTCCACATCCACCGGTAGGCGCCAACCGGCTCCGTTCTTTGGTGGCCCCTTCGCGCC
ACCTTCTACTCCTCCCCTAGTCAGGAAGTTCCCCCCCGCCCCGCAGCTCGCGTCGTGCAGGACGTGACAAATG
GAAGTAGCACGTCTCACTAGTCTCGTGCAGATGGACAGCACCGCTGAGCAATGGAAGCGGGTAGGCCTTTGGG
GCAGCGGCCAATAGCAGCTTTGCTCCTTCGCTTTCTGGGCTCAGAGGCTGGGAAGGGGTGGGTCCGGGGGCG
GGCTCAGGGGGGGGCTCAGGGGCGGGGGGGGCGCCCGAAGGTCCTCCGGAGGCCCGGCATTCTGCACGCTT
CAAAAGCGCACGTCTGCCGCGCTGTTCTCCTCTTCCTCATCTCCGGGCCTTTCGACCTGCATCCATCTAGATCTC
GAGCAGCTGAAGCTTACCATGACCGAGTACAAGCCCACGGTGCGCCTCGCCACCCGCGACGACGTCCCCAGG
GCCGTACGCACCCTCGCCGCCGCGTTCGCCGACTACCCCGCCACGCGCCACACCGTCGATCCGGACCGCCAC
ATCGAGCGGGTCACCGAGCTGCAAGAACTCTTCCTCACGCGCGTCGGGCTCGACATCGGCAAGGTGTGGGTCG
CGGACGACGGCGCCGCGGTGGCGGTCTGGACCACGCCGGAGAGCGTCGAAGCGGGGGCGGTGTTCGCCGAG
ATCGGCCCGCGCATGGCCGAGTTGAGCGGTTCCCGGCTGGCCGCGCAGCAACAGATGGAAGGCCTCCTGGCG
CCGCACCGGCCCAAGGAGCCCGCGTGGTTCCTGGCCACCGTCGGCGTCTCGCCCGACCACCAGGGCAAGGGT
CTGGGCAGCGCCGTCGTGCTCCCCGGAGTGGAGGCGGCCGAGCGCGCCGGGGTGCCCGCCTTCCTGGAGAC
CTCCGCGCCCCGCAACCTCCCCTTCTACGAGCGGCTCGGCTTCACCGTCACCGCCGACGTCGAGGTGCCCGAA
GGACCGCGCACCTGGTGCATGACCCGCAAGCCCGGTGCCGGCGGCGGGTCCGGAGGAGAGGGCAGAGGAAG
TCTCCTAACATGCGGTGACGTGGAGGAGAATCCTGGCCCAATGAGCGAGCTGATTAAGGAGAACATGCACATGA
AGCTGTACATGGAGGGCACCGTGGACAACCATCACTTCAAGTGCACATCCGAGGGCGAAGGCAAGCCCTACGA
GGGCACCCAGACCATGAGAATCAAGGTGGTCGAGGGCGGCCCTCTCCCCTTCGCCTTCGACATCCTGGCTACT
AGCTTCCTCTACGGCAGCAAGACCTTCATCAACCACACCCAGGGCATCCCCGACTTCTTCAAGCAGTCCTTCCC
TGAGGGCTTCACATGGGAGAGAGTCACCACATACGAGGACGGGGGCGTGCTGACCGCTACCCAGGACACCAG
CCTCCAGGACGGCTGCCTCATCTACAACGTCAAGATCAGAGGGGTGAACTTCACATCCAACGGCCCTGTGATGC
AGAAGAAAACACTCGGCTGGGAGGCCTTCACCGAGACGCTGTACCCCGCTGACGGCGGCCTGGAAGGCAGAA
ACGACATGGCCCTGAAGCTCGTGGGCGGGAGCCATCTGATCGCAAACATCAAGACCACATATAGATCCAAGAAA
CCCGCTAAGAACCTCAAGATGCCTGGCGTCTACTATGTGGACTACAGACTGGAAAGAATCAAGGAGGCCAACAA
CGAGACCTACGTCGAGCAGCACGAGGTGGCAGTGGCCAGATACTGCGACCTCCCTAGCAAACTGGGGCACAAG
CTTAATTGAGCGGCCGCTAGGTACCTTTAAGACCAATGACTTACAAGGCAGCTGTAGATCTTAGCCACTTTTTAA
AAGAAAAGGGGGGACTGGAAGGGCTAATTCACTCCCAAAGAAGTCAAGATCTGCTTTTTGCCTGTACTGGGTCT
CTCTGGTTAGACCAGAGTCTCTCTGGTTAGACCAGATCTGAGCCTGGGAGCTCTCTGGCTAACTAGGGAACCCA
CTGCTTAAGCCTCAATAAAGCTTGCCTTGAGTGCTTCAAGTAGTGTGTGCCCGTCTGTTGTGTGACTCTGGTAAC
TAGAGATCCCTCAGACCCTTTTAGTCAGTGTGGAAAATCTCTAGCAGTTTAAACCCGCTGATCAGCCTCGACTGT
GCCTTCTAGTTGCCAGCCATCTGTTGTTTGCCCCTCCCCCGTGCCTTCCTTGACCCTGGAAGGTGCCACTCCCA
CTGTCCTTTCCTAATAAAATGAGGAAATTGCATCGCATTGTCTGAGTAGGTGTCATTCTATTCTGGGGGGTGGGG
TGGGGCAGGACAGCAAGGGGGAGGATTGGGAAGTCAATAGCAGGCATGCTGGGGATGCGGTGGGCTCTATGG
GCGGCCGTTAATTAAGCTTTTGTTCCCTTTAGTGAGGGTTAATTGCGCGCTTGGCGTAATCATGGTCATAGCTGT
TTCCTGTGTGAAATTGTTATCCGCTCACAATTCCACACAACATACGAGCCGGAAGCATAAAGTGTAAAGCCTGGG
GTGCCTAATGAGTGAGCTAACTCACATTAATTGCGTTGCGCTCACTGCCCGCTTTCCAGTCGGGAAACCTGTCG
TGCCAGCTGCATTAATGAATCGGCCAACGCGCGGGGAGAGGCGGTTTGCGTATTGGGCGCTCTTCCGCTTCCT
CGCTCACTGACTCGCTGCGCTCGGTCGTTCGGCTGCGGCGAGCGGTATCAGCTCACTCAAAGGCGGTAATACG
GTTATCCACAGAATCAGGGGATAACGCAGGAAAGAACATGTGAGCAAAAGGCCAGCAAAAGGCCAGGAACCGT
AAAAAGGCCGCGTTGCTGGCGTTTTTCCATAGGCTCCGCCCCCCTGACGAGCATCACAAAAATCGACGCTCAAG
TCAGAGGTGGCGAAACCCGACAGGACTATAAAGATACCAGGCGTTTCCCCCTGGAAGCTCCCTCGTGCGCTCT
CCTGTTCCGACCCTGCCGCTTACCGGATACCTGTCCGCCTTTCTCCCTTCGGGAAGCGTGGCGCTTTCTCATAG
CTCACGCTGTAGGTATCTCAGTTCGGTGTAGGTCGTTCGCTCCAAGCTGGGCTGTGTGCACGAACCCCCCGTTC
AGCCCGACCGCTGCGCCTTATCCGGTAACTATCGTCTTGAGTCCAACCCGGTAAGACACGACTTATCGCCACTG
GCAGCAGCCACTGGTAACAGGATTAGCAGAGCGAGGTATGTAGGCGGTGCTACAGAGTTCTTGAAGTGGTGGC
CTAACTACGGCTACACTAGAAGGACAGTATTTGGTATCTGCGCTCTGCTGAAGCCAGTTACCTTCGGAAAAAGAG
TTGGTAGCTCTTGATCCGGCAAACAAACCACCGCTGGTAGCGGTGGTTTTTTTGTTTGCAAGCAGCAGATTACGC
GCAGAAAAAAAGGATCTCAAGAAGATCCTTTGATCTTTTCTACGGGGTCTGACGCTCAGTGGAACGAAAACTCAC
GTTAAGGGATTTTGGTCATGAGATTATCAAAAAGGATCTTCACCTAGATCCTTTTAAATTAAAAATGAAGTTTTAAA
TCAATCTAAAGTATATATGAGTAAACTTGGTCTGACAGTTACCAATGCTTAATCAGTGAGGCACCTATCTCAGCGA
TCTGTCTATTTCGTTCATCCATAGTTGCCTGACTCCCCGTCGTGTAGATAACTACGATACGGGAGGGCTTACCAT
CTGGCCCCAGTGCTGCAATGATACCGCGAGACCCACGCTCACCGGCTCCAGATTTATCAGCAATAAACCAGCCA
GCCGGAAGGGCCGAGCGCAGAAGTGGTCCTGCAACTTTATCCGCCTCCATCCAGTCTATTAATTGTTGCCGGGA
AGCTAGAGTAAGTAGTTCGCCAGTTAATAGTTTGCGCAACGTTGTTGCCATTGCTACAGGCATCGTGGTGTCACG
CTCGTCGTTTGGTATGGCTTCATTCAGCTCCGGTTCCCAACGATCAAGGCGAGTTACATGATCCCCCATGTTGTG
CAAAAAAGCGGTTAGCTCCTTCGGTCCTCCGATCGTTGTCAGAAGTAAGTTGGCCGCAGTGTTATCACTCATGGT
TATGGCAGCACTGCATAATTCTCTTACTGTCATGCCATCCGTAAGATGCTTTTCTGTGACTGGTGAGTACTCAAC
CAAGTCATTCTGAGAATAGTGTATGCGGCGACCGAGTTGCTCTTGCCCGGCGTCAATACGGGATAATACCGCGC
CACATAGCAGAACTTTAAAAGTGCTCATCATTGGAAAACGTTCTTCGGGGCGAAAACTCTCAAGGATCTTACCGC
TGTTGAGATCCAGTTCGATGTAACCCACTCGTGCACCCAACTGATCTTCAGCATCTTTTACTTTCACCAGCGTTTC
TGGGTGAGCAAAAACAGGAAGGCAAAATGCCGCAAAAAAGGGAATAAGGGCGACACGGAAATGTTGAATACTCA
TACTCTTCCTTTTTCAATATTATTGAAGCATTTATCAGGGTTATTGTCTCATGAGCGGATACATATTTGAATGTATT
TAGAAAAATAAACAAATAGGGGTTCCGCGCACATTTCCCCGAAAAGTGCCAC
pKLV-U6gRNA(Gabra5-sp_sgRNA3) used in vitro for qPCR experiments (SEQ ID NO: 10)
CTAAATTGTAAGCGTTAATATTTTGTTAAAATTCGCGTTAAATTTTTGTTAAATCAGCTCATTTTTTAACCAATAGGC
CGAAATCGGCAAAATCCCTTATAAATCAAAAGAATAGACCGAGATAGGGTTGAGTGTTGTTCCAGTTTGGAACAA
GAGTCCACTATTAAAGAACGTGGACTCCAACGTCAAAGGGCGAAAAACCGTCTATCAGGGCGATGGCCCACTAC
GTGAACCATCACCCTAATCAAGTTTTTTGGGGTCGAGGTGCCGTAAAGCACTAAATCGGAACCCTAAAGGGAGC
CCCCGATTTAGAGCTTGACGGGGAAAGCCGGCGAACGTGGCGAGAAAGGAAGGGAAGAAAGCGAAAGGAGCG
GGCGCTAGGGCGCTGGCAAGTGTAGCGGTCACGCTGCGCGTAACCACCACACCCGCCGCGCTTAATGCGCCG
CTACAGGGCGCGTCCCATTCGCCATTCAGGCTGCGCAACTGTTGGGAAGGGCGATCGGTGCGGGCCTCTTCGC
TATTACGCCAGCTGGCGAAAGGGGGATGTGCTGCAAGGCGATTAAGTTGGGTAACGCCAGGGTTTTCCCAGTC
ACGACGTTGTAAAACGACGGCCAGTGAGCGCGCGTAATACGACTCACTATAGGGCGAATTGACTAGTTATTAAT
AGTAATCAATTACGGGGTCATTAGTTCATAGCCCATATATGGAGTTCCGCGTTACATAACTTACGGTAAATGGCC
CGCCTGGCTGACCGCCCAACGACCCCCGCCCATTGACGTCAATAATGACGTATGTTCCCATAGTAACGCCAATA
GGGACTTTCCATTGACGTCAATGGGTGGAGTATTTACGGTAAACTGCCCACTTGGCAGTACATCAAGTGTATCAT
ATGCCAAGTACGCCCCCTATTGACGTCAATGACGGTAAATGGCCCGCCTGGCATTATGCCCAGTACATGACCTT
ATGGGACTTTCCTACTTGGCAGTACATCTACGTATTAGTCATCGCTATTACCATGGTGATGCGGTTTTGGCAGTA
CATCAATGGGCGTGGATAGCGGTTTGACTCACGGGGATTTCCAAGTCTCCACCCCATTGACGTCAATGGGAGTT
TGTTTTGGCACCAAAATCAACGGGACTTTCCAAAATGTCGTAACAACTCCGCCCCATTGACGCAAATGGGCGGTA
GGCGTGTACGGTGGGAGGTCTATATAAGCAGCGCGTTTTGCCTGTACTGGGTCTCTCTGGTTAGACCAGATCTG
AGCCTGGGAGCTCTCTGGCTAACTAGGGAACCCACTGCTTAAGCCTCAATAAAGCTTGCCTTGAGTGCTTCAAG
TAGTGTGTGCCCGTCTGTTGTGTGACTCTGGTAACTAGAGATCCCTCAGACCCTTTTAGTCAGTGTGGAAAATCT
CTAGCAGTGGCGCCCGAACAGGGACTTGAAAGCGAAAGGGAAACCAGAGGAGCTCTCTCGACGCAGGACTCG
GCTTGCTGAAGCGCGCACGGCAAGAGGCGAGGGGCGGCGACTGGTGAGTACGCCAAAAATTTTGACTAGCGG
AGGCTAGAAGGAGAGAGATGGGTGCGAGAGCGTCAGTATTAAGCGGGGGAGAATTAGATCGCGATGGGAAAAA
ATTCGGTTAAGGCCAGGGGGAAAGAAAAAATATAAATTAAAACATATAGTATGGGCAAGCAGGGAGCTAGAACG
ATTCGCAGTTAATCCTGGCCTGTTAGAAACATCAGAAGGCTGTAGACAAATACTGGGACAGCTACAACCATCCCT
TCAGACAGGATCAGAAGAACTTAGATCATTATATAATACAGTAGCAACCCTCTATTGTGTGCATCAAAGGATAGA
GATAAAAGACACCAAGGAAGCTTTAGACAAGATAGAGGAAGAGCAAAACAAAAGTAAGACCACCGCACAGCAAG
CGGCCGGCCGCGCTGATCTTCAGACCTGGAGGAGGAGATATGAGGGACAATTGGAGAAGTGAATTATATAAATA
TAAAGTAGTAAAAATTGAACCATTAGGAGTAGCACCCACCAAGGCAAAGAGAAGAGTGGTGCAGAGAGAAAAAA
GAGCAGTGGGAATAGGAGCTTTGTTCCTTGGGTTCTTGGGAGCAGCAGGAAGCACTATGGGCGCAGCGTCAAT
GACGCTGACGGTACAGGCCAGACAATTATTGTCTGGTATAGTGCAGCAGCAGAACAATTTGCTGAGGGCTATTG
AGGCGCAACAGCATCTGTTGCAACTCACAGTCTGGGGCATCAAGCAGCTCCAGGCAAGAATCCTGGCTGTGGA
AAGATACCTAAAGGATCAACAGCTCCTGGGGATTTGGGGTTGCTCTGGAAAACTCATTTGCACCACTGCTGTGC
CTTGGAATGCTAGTTGGAGTAATAAATCTCTGGAACAGATTTGGAATCACACGACCTGGATGGAGTGGGACAGA
GAAATTAACAATTACACAAGCTTAATACACTCCTTAATTGAAGAATCGCAAAACCAGCAAGAAAAGAATGAACAAG
AATTATTGGAATTAGATAAATGGGCAAGTTTGTGGAATTGGTTTAACATAACAAATTGGCTGTGGTATATAAAATTA
TTCATAATGATAGTAGGAGGCTTGGTAGGTTTAAGAATAGTTTTTGCTGTACTTTCTATAGTGAATAGAGTTAGGC
AGGGATATTCACCATTATCGTTTCAGACCCACCTCCCAACCCCGAGGGGACCCGACAGGCCCGAAGGAATAGAA
GAAGAAGGTGGAGAGAGAGACAGAGACAGATCCATTCGATTAGTGAACGGATCGGCACTGCGTGCGCCAATTC
TGCAGACAAATGGCAGTATTCATCCACAATTTTAAAAGAAAAGGGGGGATTGGGGGGTACAGTGCAGGGGAAAG
AATAGTAGACATAATAGCAACAGACATACAAACTAAAGAATTACAAAAACAAATTACAAAAATTCAAAATTTTCGGG
TTTATTACAGGGACAGCAGAGATCCAGTTTGGTTAGTACCGGGCCCTACGCGTTACTCGAGCCAAGGTCGGGCA
GGAAGAGGGCCTATTTCCCATGATTCCTTCATATTTGCATATACGATACAAGGCTGTTAGAGAGATAATTAGAATT
AATTTGACTGTAAACACAAAGATATTAGTACAAAATACGTGACGTAGAAAGTAATAATTTCTTGGGTAGTTTGCAG
TTTTAAAATTATGTTTTAAAATGGACTATCATATGCTTACCGTAACTTGAAAGTATTTCGATTTCTTGGCTTTATATA
TCTTGTGGAAAGGACGAAAcaccgAACATGGTCTTTCCCGAAGCgtTTTAGAGCTAGAAATAGCAAGTTAAAATAAG
GCTAGTCCGTTATCAACTTGAAAAAGTGGCACCGAGTCGGTGCTTTTTTTGGATCCAATTCTACCGGGTAGGGGA
GGCGCTTTTCCCAAGGCAGTCTGGAGCATGCGCTTTAGCAGCCCCGCTGGGCACTTGGCGCTACACAAGTGGC
CTCTGGCCTCGCACACATTCCACATCCACCGGTAGGCGCCAACCGGCTCCGTTCTTTGGTGGCCCCTTCGCGC
CACCTTCTACTCCTCCCCTAGTCAGGAAGTTCCCCCCCGCCCCGCAGCTCGCGTCGTGCAGGACGTGACAAAT
GGAAGTAGCACGTCTCACTAGTCTCGTGCAGATGGACAGCACCGCTGAGCAATGGAAGCGGGTAGGCCTTTGG
GGCAGCGGCCAATAGCAGCTTTGCTCCTTCGCTTTCTGGGCTCAGAGGCTGGGAAGGGGTGGGTCCGGGGGC
GGGCTCAGGGGGGGGCTCAGGGGCGGGGGGGGCGCCCGAAGGTCCTCCGGAGGCCCGGCATTCTGCACGCT
TCAAAAGCGCACGTCTGCCGCGCTGTTCTCCTCTTCCTCATCTCCGGGCCTTTCGACCTGCATCCATCTAGATCT
CGAGCAGCTGAAGCTTACCATGACCGAGTACAAGCCCACGGTGCGCCTCGCCACCCGCGACGACGTCCCCAG
GGCCGTACGCACCCTCGCCGCCGCGTTCGCCGACTACCCCGCCACGCGCCACACCGTCGATCCGGACCGCCA
CATCGAGCGGGTCACCGAGCTGCAAGAACTCTTCCTCACGCGCGTCGGGCTCGACATCGGCAAGGTGTGGGTC
GCGGACGACGGCGCCGCGGTGGCGGTCTGGACCACGCCGGAGAGCGTCGAAGCGGGGGCGGTGTTCGCCGA
GATCGGCCCGCGCATGGCCGAGTTGAGCGGTTCCCGGCTGGCCGCGCAGCAACAGATGGAAGGCCTCCTGGC
GCCGCACCGGCCCAAGGAGCCCGCGTGGTTCCTGGCCACCGTCGGCGTCTCGCCCGACCACCAGGGCAAGG
GTCTGGGCAGCGCCGTCGTGCTCCCCGGAGTGGAGGCGGCCGAGCGCGCCGGGGTGCCCGCCTTCCTGGAG
ACCTCCGCGCCCCGCAACCTCCCCTTCTACGAGCGGCTCGGCTTCACCGTCACCGCCGACGTCGAGGTGCCC
GAAGGACCGCGCACCTGGTGCATGACCCGCAAGCCCGGTGCCGGCGGCGGGTCCGGAGGAGAGGGCAGAGG
AAGTCTCCTAACATGCGGTGACGTGGAGGAGAATCCTGGCCCAATGAGCGAGCTGATTAAGGAGAACATGCACA
TGAAGCTGTACATGGAGGGCACCGTGGACAACCATCACTTCAAGTGCACATCCGAGGGCGAAGGCAAGCCCTA
CGAGGGCACCCAGACCATGAGAATCAAGGTGGTCGAGGGCGGCCCTCTCCCCTTCGCCTTCGACATCCTGGCT
ACTAGCTTCCTCTACGGCAGCAAGACCTTCATCAACCACACCCAGGGCATCCCCGACTTCTTCAAGCAGTCCTT
CCCTGAGGGCTTCACATGGGAGAGAGTCACCACATACGAGGACGGGGGCGTGCTGACCGCTACCCAGGACAC
CAGCCTCCAGGACGGCTGCCTCATCTACAACGTCAAGATCAGAGGGGTGAACTTCACATCCAACGGCCCTGTGA
TGCAGAAGAAAACACTCGGCTGGGAGGCCTTCACCGAGACGCTGTACCCCGCTGACGGCGGCCTGGAAGGCA
GAAACGACATGGCCCTGAAGCTCGTGGGCGGGAGCCATCTGATCGCAAACATCAAGACCACATATAGATCCAAG
AAACCCGCTAAGAACCTCAAGATGCCTGGCGTCTACTATGTGGACTACAGACTGGAAAGAATCAAGGAGGCCAA
CAACGAGACCTACGTCGAGCAGCACGAGGTGGCAGTGGCCAGATACTGCGACCTCCCTAGCAAACTGGGGCAC
AAGCTTAATTGAGCGGCCGCTAGGTACCTTTAAGACCAATGACTTACAAGGCAGCTGTAGATCTTAGCCACTTTT
TAAAAGAAAAGGGGGGACTGGAAGGGCTAATTCACTCCCAAAGAAGTCAAGATCTGCTTTTTGCCTGTACTGGG
TCTCTCTGGTTAGACCAGAGTCTCTCTGGTTAGACCAGATCTGAGCCTGGGAGCTCTCTGGCTAACTAGGGAAC
CCACTGCTTAAGCCTCAATAAAGCTTGCCTTGAGTGCTTCAAGTAGTGTGTGCCCGTCTGTTGTGTGACTCTGGT
AACTAGAGATCCCTCAGACCCTTTTAGTCAGTGTGGAAAATCTCTAGCAGTTTAAACCCGCTGATCAGCCTCGAC
TGTGCCTTCTAGTTGCCAGCCATCTGTTGTTTGCCCCTCCCCCGTGCCTTCCTTGACCCTGGAAGGTGCCACTC
CCACTGTCCTTTCCTAATAAAATGAGGAAATTGCATCGCATTGTCTGAGTAGGTGTCATTCTATTCTGGGGGGTG
GGGTGGGGCAGGACAGCAAGGGGGAGGATTGGGAAGTCAATAGCAGGCATGCTGGGGATGCGGTGGGCTCTA
TGGGCGGCCGTTAATTAAGCTTTTGTTCCCTTTAGTGAGGGTTAATTGCGCGCTTGGCGTAATCATGGTCATAGC
TGTTTCCTGTGTGAAATTGTTATCCGCTCACAATTCCACACAACATACGAGCCGGAAGCATAAAGTGTAAAGCCT
GGGGTGCCTAATGAGTGAGCTAACTCACATTAATTGCGTTGCGCTCACTGCCCGCTTTCCAGTCGGGAAACCTG
TCGTGCCAGCTGCATTAATGAATCGGCCAACGCGCGGGGAGAGGCGGTTTGCGTATTGGGCGCTCTTCCGCTT
CCTCGCTCACTGACTCGCTGCGCTCGGTCGTTCGGCTGCGGCGAGCGGTATCAGCTCACTCAAAGGCGGTAAT
ACGGTTATCCACAGAATCAGGGGATAACGCAGGAAAGAACATGTGAGCAAAAGGCCAGCAAAAGGCCAGGAAC
CGTAAAAAGGCCGCGTTGCTGGCGTTTTTCCATAGGCTCCGCCCCCCTGACGAGCATCACAAAAATCGACGCTC
AAGTCAGAGGTGGCGAAACCCGACAGGACTATAAAGATACCAGGCGTTTCCCCCTGGAAGCTCCCTCGTGCGC
TCTCCTGTTCCGACCCTGCCGCTTACCGGATACCTGTCCGCCTTTCTCCCTTCGGGAAGCGTGGCGCTTTCTCA
TAGCTCACGCTGTAGGTATCTCAGTTCGGTGTAGGTCGTTCGCTCCAAGCTGGGCTGTGTGCACGAACCCCCCG
TTCAGCCCGACCGCTGCGCCTTATCCGGTAACTATCGTCTTGAGTCCAACCCGGTAAGACACGACTTATCGCCA
CTGGCAGCAGCCACTGGTAACAGGATTAGCAGAGCGAGGTATGTAGGCGGTGCTACAGAGTTCTTGAAGTGGT
GGCCTAACTACGGCTACACTAGAAGGACAGTATTTGGTATCTGCGCTCTGCTGAAGCCAGTTACCTTCGGAAAA
AGAGTTGGTAGCTCTTGATCCGGCAAACAAACCACCGCTGGTAGCGGTGGTTTTTTTGTTTGCAAGCAGCAGATT
ACGCGCAGAAAAAAAGGATCTCAAGAAGATCCTTTGATCTTTTCTACGGGGTCTGACGCTCAGTGGAACGAAAA
CTCACGTTAAGGGATTTTGGTCATGAGATTATCAAAAAGGATCTTCACCTAGATCCTTTTAAATTAAAAATGAAGTT
TTAAATCAATCTAAAGTATATATGAGTAAACTTGGTCTGACAGTTACCAATGCTTAATCAGTGAGGCACCTATCTC
AGCGATCTGTCTATTTCGTTCATCCATAGTTGCCTGACTCCCCGTCGTGTAGATAACTACGATACGGGAGGGCTT
ACCATCTGGCCCCAGTGCTGCAATGATACCGCGAGACCCACGCTCACCGGCTCCAGATTTATCAGCAATAAACC
AGCCAGCCGGAAGGGCCGAGCGCAGAAGTGGTCCTGCAACTTTATCCGCCTCCATCCAGTCTATTAATTGTTGC
CGGGAAGCTAGAGTAAGTAGTTCGCCAGTTAATAGTTTGCGCAACGTTGTTGCCATTGCTACAGGCATCGTGGT
GTCACGCTCGTCGTTTGGTATGGCTTCATTCAGCTCCGGTTCCCAACGATCAAGGCGAGTTACATGATCCCCCA
TGTTGTGCAAAAAAGCGGTTAGCTCCTTCGGTCCTCCGATCGTTGTCAGAAGTAAGTTGGCCGCAGTGTTATCAC
TCATGGTTATGGCAGCACTGCATAATTCTCTTACTGTCATGCCATCCGTAAGATGCTTTTCTGTGACTGGTGAGTA
CTCAACCAAGTCATTCTGAGAATAGTGTATGCGGCGACCGAGTTGCTCTTGCCCGGCGTCAATACGGGATAATA
CCGCGCCACATAGCAGAACTTTAAAAGTGCTCATCATTGGAAAACGTTCTTCGGGGCGAAAACTCTCAAGGATCT
TACCGCTGTTGAGATCCAGTTCGATGTAACCCACTCGTGCACCCAACTGATCTTCAGCATCTTTTACTTTCACCA
GCGTTTCTGGGTGAGCAAAAACAGGAAGGCAAAATGCCGCAAAAAAGGGAATAAGGGCGACACGGAAATGTTG
AATACTCATACTCTTCCTTTTTCAATATTATTGAAGCATTTATCAGGGTTATTGTCTCATGAGCGGATACATATTTG
AATGTATTTAGAAAAATAAACAAATAGGGGTTCCGCGCACATTTCCCCGAAAAGTGCCAC
pKLV-U6gRNA(Gabra5-sp_sgRNALacZ) used as control in vitro for qPCR experiments (SEQ ID NO: 11)
CTAAATTGTAAGCGTTAATATTTTGTTAAAATTCGCGTTAAATTTTTGTTAAATCAGCTCATTTTTTAACCAATAGGC
CGAAATCGGCAAAATCCCTTATAAATCAAAAGAATAGACCGAGATAGGGTTGAGTGTTGTTCCAGTTTGGAACAA
GAGTCCACTATTAAAGAACGTGGACTCCAACGTCAAAGGGCGAAAAACCGTCTATCAGGGCGATGGCCCACTAC
GTGAACCATCACCCTAATCAAGTTTTTTGGGGTCGAGGTGCCGTAAAGCACTAAATCGGAACCCTAAAGGGAGC
CCCCGATTTAGAGCTTGACGGGGAAAGCCGGCGAACGTGGCGAGAAAGGAAGGGAAGAAAGCGAAAGGAGCG
GGCGCTAGGGCGCTGGCAAGTGTAGCGGTCACGCTGCGCGTAACCACCACACCCGCCGCGCTTAATGCGCCG
CTACAGGGCGCGTCCCATTCGCCATTCAGGCTGCGCAACTGTTGGGAAGGGCGATCGGTGCGGGCCTCTTCGC
TATTACGCCAGCTGGCGAAAGGGGGATGTGCTGCAAGGCGATTAAGTTGGGTAACGCCAGGGTTTTCCCAGTC
ACGACGTTGTAAAACGACGGCCAGTGAGCGCGCGTAATACGACTCACTATAGGGCGAATTGACTAGTTATTAAT
AGTAATCAATTACGGGGTCATTAGTTCATAGCCCATATATGGAGTTCCGCGTTACATAACTTACGGTAAATGGCC
CGCCTGGCTGACCGCCCAACGACCCCCGCCCATTGACGTCAATAATGACGTATGTTCCCATAGTAACGCCAATA
GGGACTTTCCATTGACGTCAATGGGTGGAGTATTTACGGTAAACTGCCCACTTGGCAGTACATCAAGTGTATCAT
ATGCCAAGTACGCCCCCTATTGACGTCAATGACGGTAAATGGCCCGCCTGGCATTATGCCCAGTACATGACCTT
ATGGGACTTTCCTACTTGGCAGTACATCTACGTATTAGTCATCGCTATTACCATGGTGATGCGGTTTTGGCAGTA
CATCAATGGGCGTGGATAGCGGTTTGACTCACGGGGATTTCCAAGTCTCCACCCCATTGACGTCAATGGGAGTT
TGTTTTGGCACCAAAATCAACGGGACTTTCCAAAATGTCGTAACAACTCCGCCCCATTGACGCAAATGGGCGGTA
GGCGTGTACGGTGGGAGGTCTATATAAGCAGCGCGTTTTGCCTGTACTGGGTCTCTCTGGTTAGACCAGATCTG
AGCCTGGGAGCTCTCTGGCTAACTAGGGAACCCACTGCTTAAGCCTCAATAAAGCTTGCCTTGAGTGCTTCAAG
TAGTGTGTGCCCGTCTGTTGTGTGACTCTGGTAACTAGAGATCCCTCAGACCCTTTTAGTCAGTGTGGAAAATCT
CTAGCAGTGGCGCCCGAACAGGGACTTGAAAGCGAAAGGGAAACCAGAGGAGCTCTCTCGACGCAGGACTCG
GCTTGCTGAAGCGCGCACGGCAAGAGGCGAGGGGCGGCGACTGGTGAGTACGCCAAAAATTTTGACTAGCGG
AGGCTAGAAGGAGAGAGATGGGTGCGAGAGCGTCAGTATTAAGCGGGGGAGAATTAGATCGCGATGGGAAAAA
ATTCGGTTAAGGCCAGGGGGAAAGAAAAAATATAAATTAAAACATATAGTATGGGCAAGCAGGGAGCTAGAACG
ATTCGCAGTTAATCCTGGCCTGTTAGAAACATCAGAAGGCTGTAGACAAATACTGGGACAGCTACAACCATCCCT
TCAGACAGGATCAGAAGAACTTAGATCATTATATAATACAGTAGCAACCCTCTATTGTGTGCATCAAAGGATAGA
GATAAAAGACACCAAGGAAGCTTTAGACAAGATAGAGGAAGAGCAAAACAAAAGTAAGACCACCGCACAGCAAG
CGGCCGGCCGCGCTGATCTTCAGACCTGGAGGAGGAGATATGAGGGACAATTGGAGAAGTGAATTATATAAATA
TAAAGTAGTAAAAATTGAACCATTAGGAGTAGCACCCACCAAGGCAAAGAGAAGAGTGGTGCAGAGAGAAAAAA
GAGCAGTGGGAATAGGAGCTTTGTTCCTTGGGTTCTTGGGAGCAGCAGGAAGCACTATGGGCGCAGCGTCAAT
GACGCTGACGGTACAGGCCAGACAATTATTGTCTGGTATAGTGCAGCAGCAGAACAATTTGCTGAGGGCTATTG
AGGCGCAACAGCATCTGTTGCAACTCACAGTCTGGGGCATCAAGCAGCTCCAGGCAAGAATCCTGGCTGTGGA
AAGATACCTAAAGGATCAACAGCTCCTGGGGATTTGGGGTTGCTCTGGAAAACTCATTTGCACCACTGCTGTGC
CTTGGAATGCTAGTTGGAGTAATAAATCTCTGGAACAGATTTGGAATCACACGACCTGGATGGAGTGGGACAGA
GAAATTAACAATTACACAAGCTTAATACACTCCTTAATTGAAGAATCGCAAAACCAGCAAGAAAAGAATGAACAAG
AATTATTGGAATTAGATAAATGGGCAAGTTTGTGGAATTGGTTTAACATAACAAATTGGCTGTGGTATATAAAATTA
TTCATAATGATAGTAGGAGGCTTGGTAGGTTTAAGAATAGTTTTTGCTGTACTTTCTATAGTGAATAGAGTTAGGC
AGGGATATTCACCATTATCGTTTCAGACCCACCTCCCAACCCCGAGGGGACCCGACAGGCCCGAAGGAATAGAA
GAAGAAGGTGGAGAGAGAGACAGAGACAGATCCATTCGATTAGTGAACGGATCGGCACTGCGTGCGCCAATTC
TGCAGACAAATGGCAGTATTCATCCACAATTTTAAAAGAAAAGGGGGGATTGGGGGGTACAGTGCAGGGGAAAG
AATAGTAGACATAATAGCAACAGACATACAAACTAAAGAATTACAAAAACAAATTACAAAAATTCAAAATTTTCGGG
TTTATTACAGGGACAGCAGAGATCCAGTTTGGTTAGTACCGGGCCCTACGCGTTACTCGAGCCAAGGTCGGGCA
GGAAGAGGGCCTATTTCCCATGATTCCTTCATATTTGCATATACGATACAAGGCTGTTAGAGAGATAATTAGAATT
AATTTGACTGTAAACACAAAGATATTAGTACAAAATACGTGACGTAGAAAGTAATAATTTCTTGGGTAGTTTGCAG
TTTTAAAATTATGTTTTAAAATGGACTATCATATGCTTACCGTAACTTGAAAGTATTTCGATTTCTTGGCTTTATATA
TCTTGTGGAAAGGACGAAAcaccgTGCGAATACGCCCACGCGATgtTTTAGAGCTAGAAATAGCAAGTTAAAATAAG
GCTAGTCCGTTATCAACTTGAAAAAGTGGCACCGAGTCGGTGCTTTTTTTGGATCCAATTCTACCGGGTAGGGGA
GGCGCTTTTCCCAAGGCAGTCTGGAGCATGCGCTTTAGCAGCCCCGCTGGGCACTTGGCGCTACACAAGTGGC
CTCTGGCCTCGCACACATTCCACATCCACCGGTAGGCGCCAACCGGCTCCGTTCTTTGGTGGCCCCTTCGCGC
CACCTTCTACTCCTCCCCTAGTCAGGAAGTTCCCCCCCGCCCCGCAGCTCGCGTCGTGCAGGACGTGACAAAT
GGAAGTAGCACGTCTCACTAGTCTCGTGCAGATGGACAGCACCGCTGAGCAATGGAAGCGGGTAGGCCTTTGG
GGCAGCGGCCAATAGCAGCTTTGCTCCTTCGCTTTCTGGGCTCAGAGGCTGGGAAGGGGTGGGTCCGGGGGC
GGGCTCAGGGGGGGGCTCAGGGGCGGGGGGGGCGCCCGAAGGTCCTCCGGAGGCCCGGCATTCTGCACGCT
TCAAAAGCGCACGTCTGCCGCGCTGTTCTCCTCTTCCTCATCTCCGGGCCTTTCGACCTGCATCCATCTAGATCT
CGAGCAGCTGAAGCTTACCATGACCGAGTACAAGCCCACGGTGCGCCTCGCCACCCGCGACGACGTCCCCAG
GGCCGTACGCACCCTCGCCGCCGCGTTCGCCGACTACCCCGCCACGCGCCACACCGTCGATCCGGACCGCCA
CATCGAGCGGGTCACCGAGCTGCAAGAACTCTTCCTCACGCGCGTCGGGCTCGACATCGGCAAGGTGTGGGTC
GCGGACGACGGCGCCGCGGTGGCGGTCTGGACCACGCCGGAGAGCGTCGAAGCGGGGGCGGTGTTCGCCGA
GATCGGCCCGCGCATGGCCGAGTTGAGCGGTTCCCGGCTGGCCGCGCAGCAACAGATGGAAGGCCTCCTGGC
GCCGCACCGGCCCAAGGAGCCCGCGTGGTTCCTGGCCACCGTCGGCGTCTCGCCCGACCACCAGGGCAAGG
GTCTGGGCAGCGCCGTCGTGCTCCCCGGAGTGGAGGCGGCCGAGCGCGCCGGGGTGCCCGCCTTCCTGGAG
ACCTCCGCGCCCCGCAACCTCCCCTTCTACGAGCGGCTCGGCTTCACCGTCACCGCCGACGTCGAGGTGCCC
GAAGGACCGCGCACCTGGTGCATGACCCGCAAGCCCGGTGCCGGCGGCGGGTCCGGAGGAGAGGGCAGAGG
AAGTCTCCTAACATGCGGTGACGTGGAGGAGAATCCTGGCCCAATGAGCGAGCTGATTAAGGAGAACATGCACA
TGAAGCTGTACATGGAGGGCACCGTGGACAACCATCACTTCAAGTGCACATCCGAGGGCGAAGGCAAGCCCTA
CGAGGGCACCCAGACCATGAGAATCAAGGTGGTCGAGGGCGGCCCTCTCCCCTTCGCCTTCGACATCCTGGCT
ACTAGCTTCCTCTACGGCAGCAAGACCTTCATCAACCACACCCAGGGCATCCCCGACTTCTTCAAGCAGTCCTT
CCCTGAGGGCTTCACATGGGAGAGAGTCACCACATACGAGGACGGGGGCGTGCTGACCGCTACCCAGGACAC
CAGCCTCCAGGACGGCTGCCTCATCTACAACGTCAAGATCAGAGGGGTGAACTTCACATCCAACGGCCCTGTGA
TGCAGAAGAAAACACTCGGCTGGGAGGCCTTCACCGAGACGCTGTACCCCGCTGACGGCGGCCTGGAAGGCA
GAAACGACATGGCCCTGAAGCTCGTGGGCGGGAGCCATCTGATCGCAAACATCAAGACCACATATAGATCCAAG
AAACCCGCTAAGAACCTCAAGATGCCTGGCGTCTACTATGTGGACTACAGACTGGAAAGAATCAAGGAGGCCAA
CAACGAGACCTACGTCGAGCAGCACGAGGTGGCAGTGGCCAGATACTGCGACCTCCCTAGCAAACTGGGGCAC
AAGCTTAATTGAGCGGCCGCTAGGTACCTTTAAGACCAATGACTTACAAGGCAGCTGTAGATCTTAGCCACTTTT
TAAAAGAAAAGGGGGGACTGGAAGGGCTAATTCACTCCCAAAGAAGTCAAGATCTGCTTTTTGCCTGTACTGGG
TCTCTCTGGTTAGACCAGAGTCTCTCTGGTTAGACCAGATCTGAGCCTGGGAGCTCTCTGGCTAACTAGGGAAC
CCACTGCTTAAGCCTCAATAAAGCTTGCCTTGAGTGCTTCAAGTAGTGTGTGCCCGTCTGTTGTGTGACTCTGGT
AACTAGAGATCCCTCAGACCCTTTTAGTCAGTGTGGAAAATCTCTAGCAGTTTAAACCCGCTGATCAGCCTCGAC
TGTGCCTTCTAGTTGCCAGCCATCTGTTGTTTGCCCCTCCCCCGTGCCTTCCTTGACCCTGGAAGGTGCCACTC
CCACTGTCCTTTCCTAATAAAATGAGGAAATTGCATCGCATTGTCTGAGTAGGTGTCATTCTATTCTGGGGGGTG
GGGTGGGGCAGGACAGCAAGGGGGAGGATTGGGAAGTCAATAGCAGGCATGCTGGGGATGCGGTGGGCTCTA
TGGGCGGCCGTTAATTAAGCTTTTGTTCCCTTTAGTGAGGGTTAATTGCGCGCTTGGCGTAATCATGGTCATAGC
TGTTTCCTGTGTGAAATTGTTATCCGCTCACAATTCCACACAACATACGAGCCGGAAGCATAAAGTGTAAAGCCT
GGGGTGCCTAATGAGTGAGCTAACTCACATTAATTGCGTTGCGCTCACTGCCCGCTTTCCAGTCGGGAAACCTG
TCGTGCCAGCTGCATTAATGAATCGGCCAACGCGCGGGGAGAGGCGGTTTGCGTATTGGGCGCTCTTCCGCTT
CCTCGCTCACTGACTCGCTGCGCTCGGTCGTTCGGCTGCGGCGAGCGGTATCAGCTCACTCAAAGGCGGTAAT
ACGGTTATCCACAGAATCAGGGGATAACGCAGGAAAGAACATGTGAGCAAAAGGCCAGCAAAAGGCCAGGAAC
CGTAAAAAGGCCGCGTTGCTGGCGTTTTTCCATAGGCTCCGCCCCCCTGACGAGCATCACAAAAATCGACGCTC
AAGTCAGAGGTGGCGAAACCCGACAGGACTATAAAGATACCAGGCGTTTCCCCCTGGAAGCTCCCTCGTGCGC
TCTCCTGTTCCGACCCTGCCGCTTACCGGATACCTGTCCGCCTTTCTCCCTTCGGGAAGCGTGGCGCTTTCTCA
TAGCTCACGCTGTAGGTATCTCAGTTCGGTGTAGGTCGTTCGCTCCAAGCTGGGCTGTGTGCACGAACCCCCCG
TTCAGCCCGACCGCTGCGCCTTATCCGGTAACTATCGTCTTGAGTCCAACCCGGTAAGACACGACTTATCGCCA
CTGGCAGCAGCCACTGGTAACAGGATTAGCAGAGCGAGGTATGTAGGCGGTGCTACAGAGTTCTTGAAGTGGT
GGCCTAACTACGGCTACACTAGAAGGACAGTATTTGGTATCTGCGCTCTGCTGAAGCCAGTTACCTTCGGAAAA
AGAGTTGGTAGCTCTTGATCCGGCAAACAAACCACCGCTGGTAGCGGTGGTTTTTTTGTTTGCAAGCAGCAGATT
ACGCGCAGAAAAAAAGGATCTCAAGAAGATCCTTTGATCTTTTCTACGGGGTCTGACGCTCAGTGGAACGAAAA
CTCACGTTAAGGGATTTTGGTCATGAGATTATCAAAAAGGATCTTCACCTAGATCCTTTTAAATTAAAAATGAAGTT
TTAAATCAATCTAAAGTATATATGAGTAAACTTGGTCTGACAGTTACCAATGCTTAATCAGTGAGGCACCTATCTC
AGCGATCTGTCTATTTCGTTCATCCATAGTTGCCTGACTCCCCGTCGTGTAGATAACTACGATACGGGAGGGCTT
ACCATCTGGCCCCAGTGCTGCAATGATACCGCGAGACCCACGCTCACCGGCTCCAGATTTATCAGCAATAAACC
AGCCAGCCGGAAGGGCCGAGCGCAGAAGTGGTCCTGCAACTTTATCCGCCTCCATCCAGTCTATTAATTGTTGC
CGGGAAGCTAGAGTAAGTAGTTCGCCAGTTAATAGTTTGCGCAACGTTGTTGCCATTGCTACAGGCATCGTGGT
GTCACGCTCGTCGTTTGGTATGGCTTCATTCAGCTCCGGTTCCCAACGATCAAGGCGAGTTACATGATCCCCCA
TGTTGTGCAAAAAAGCGGTTAGCTCCTTCGGTCCTCCGATCGTTGTCAGAAGTAAGTTGGCCGCAGTGTTATCAC
TCATGGTTATGGCAGCACTGCATAATTCTCTTACTGTCATGCCATCCGTAAGATGCTTTTCTGTGACTGGTGAGTA
CTCAACCAAGTCATTCTGAGAATAGTGTATGCGGCGACCGAGTTGCTCTTGCCCGGCGTCAATACGGGATAATA
CCGCGCCACATAGCAGAACTTTAAAAGTGCTCATCATTGGAAAACGTTCTTCGGGGCGAAAACTCTCAAGGATCT
TACCGCTGTTGAGATCCAGTTCGATGTAACCCACTCGTGCACCCAACTGATCTTCAGCATCTTTTACTTTCACCA
GCGTTTCTGGGTGAGCAAAAACAGGAAGGCAAAATGCCGCAAAAAAGGGAATAAGGGCGACACGGAAATGTTG
AATACTCATACTCTTCCTTTTTCAATATTATTGAAGCATTTATCAGGGTTATTGTCTCATGAGCGGATACATATTTG
AATGTATTTAGAAAAATAAACAAATAGGGGTTCCGCGCACATTTCCCCGAAAAGTGCCAC
pLenti-eF1a_dCAS-VP64_Blast for in vitro for qPCR experiments (SEQ ID NO: 12)
GTCGACGGATCGGGAGATCTCCCGATCCCCTATGGTGCACTCTCAGTACAATCTGCTCTGATGCCGCATAGTTA
AGCCAGTATCTGCTCCCTGCTTGTGTGTTGGAGGTCGCTGAGTAGTGCGCGAGCAAAATTTAAGCTACAACAAG
GCAAGGCTTGACCGACAATTGCATGAAGAATCTGCTTAGGGTTAGGCGTTTTGCGCTGCTTCGCGATGTACGGG
CCAGATATACGCGTTGACATTGATTATTGACTAGTTATTAATAGTAATCAATTACGGGGTCATTAGTTCATAGCCC
ATATATGGAGTTCCGCGTTACATAACTTACGGTAAATGGCCCGCCTGGCTGACCGCCCAACGACCCCCGCCCAT
TGACGTCAATAATGACGTATGTTCCCATAGTAACGCCAATAGGGACTTTCCATTGACGTCAATGGGTGGAGTATT
TACGGTAAACTGCCCACTTGGCAGTACATCAAGTGTATCATATGCCAAGTACGCCCCCTATTGACGTCAATGACG
GTAAATGGCCCGCCTGGCATTATGCCCAGTACATGACCTTATGGGACTTTCCTACTTGGCAGTACATCTACGTAT
TAGTCATCGCTATTACCATGGTGATGCGGTTTTGGCAGTACATCAATGGGCGTGGATAGCGGTTTGACTCACGG
GGATTTCCAAGTCTCCACCCCATTGACGTCAATGGGAGTTTGTTTTGGCACCAAAATCAACGGGACTTTCCAAAA
TGTCGTAACAACTCCGCCCCATTGACGCAAATGGGCGGTAGGCGTGTACGGTGGGAGGTCTATATAAGCAGCG
CGTTTTGCCTGTACTGGGTCTCTCTGGTTAGACCAGATCTGAGCCTGGGAGCTCTCTGGCTAACTAGGGAACCC
ACTGCTTAAGCCTCAATAAAGCTTGCCTTGAGTGCTTCAAGTAGTGTGTGCCCGTCTGTTGTGTGACTCTGGTAA
CTAGAGATCCCTCAGACCCTTTTAGTCAGTGTGGAAAATCTCTAGCAGTGGCGCCCGAACAGGGACTTGAAAGC
GAAAGGGAAACCAGAGGAGCTCTCTCGACGCAGGACTCGGCTTGCTGAAGCGCGCACGGCAAGAGGCGAGGG
GCGGCGACTGGTGAGTACGCCAAAAATTTTGACTAGCGGAGGCTAGAAGGAGAGAGATGGGTGCGAGAGCGTC
AGTATTAAGCGGGGGAGAATTAGATCGCGATGGGAAAAAATTCGGTTAAGGCCAGGGGGAAAGAAAAAATATAA
ATTAAAACATATAGTATGGGCAAGCAGGGAGCTAGAACGATTCGCAGTTAATCCTGGCCTGTTAGAAACATCAGA
AGGCTGTAGACAAATACTGGGACAGCTACAACCATCCCTTCAGACAGGATCAGAAGAACTTAGATCATTATATAA
TACAGTAGCAACCCTCTATTGTGTGCATCAAAGGATAGAGATAAAAGACACCAAGGAAGCTTTAGACAAGATAGA
GGAAGAGCAAAACAAAAGTAAGACCACCGCACAGCAAGCGGCCGCTGATCTTCAGACCTGGAGGAGGAGATAT
GAGGGACAATTGGAGAAGTGAATTATATAAATATAAAGTAGTAAAAATTGAACCATTAGGAGTAGCACCCACCAA
GGCAAAGAGAAGAGTGGTGCAGAGAGAAAAAAGAGCAGTGGGAATAGGAGCTTTGTTCCTTGGGTTCTTGGGA
GCAGCAGGAAGCACTATGGGCGCAGCGTCAATGACGCTGACGGTACAGGCCAGACAATTATTGTCTGGTATAGT
GCAGCAGCAGAACAATTTGCTGAGGGCTATTGAGGCGCAACAGCATCTGTTGCAACTCACAGTCTGGGGCATCA
AGCAGCTCCAGGCAAGAATCCTGGCTGTGGAAAGATACCTAAAGGATCAACAGCTCCTGGGGATTTGGGGTTGC
TCTGGAAAACTCATTTGCACCACTGCTGTGCCTTGGAATGCTAGTTGGAGTAATAAATCTCTGGAACAGATTTGG
AATCACACGACCTGGATGGAGTGGGACAGAGAAATTAACAATTACACAAGCTTAATACACTCCTTAATTGAAGAA
TCGCAAAACCAGCAAGAAAAGAATGAACAAGAATTATTGGAATTAGATAAATGGGCAAGTTTGTGGAATTGGTTT
AACATAACAAATTGGCTGTGGTATATAAAATTATTCATAATGATAGTAGGAGGCTTGGTAGGTTTAAGAATAGTTT
TTGCTGTACTTTCTATAGTGAATAGAGTTAGGCAGGGATATTCACCATTATCGTTTCAGACCCACCTCCCAACCC
CGAGGGGACCCGACAGGCCCGAAGGAATAGAAGAAGAAGGTGGAGAGAGAGACAGAGACAGATCCATTCGATT
AGTGAACGGATCGGCACTGCGTGCGCCAATTCTGCAGACAAATGGCAGTATTCATCCACAATTTTAAAAGAAAAG
GGGGGATTGGGGGGTACAGTGCAGGGGAAAGAATAGTAGACATAATAGCAACAGACATACAAACTAAAGAATTA
CAAAAACAAATTACAAAAATTCAAAATTTTCGGGTTTATTACAGGGACAGCAGAGATCCAGTTTGGTTAATTAGCT
AGCTGCAAAGATGGATAAAGTTTTAAACAGAGAGGAATCTTTGCAGCTAATGGACCTTCTAGGTCTTGAAAGGAG
TGGGAATTGGCTCCGGTGCCCGTCAGTGGGCAGAGCGCACATCGCCCACAGTCCCCGAGAAGTTGGGGGGAG
GGGTCGGCAATTGAACCGGTGCCTAGAGAAGGTGGCGCGGGGTAAACTGGGAAAGTGATGTCGTGTACTGGCT
CCGCCTTTTTCCCGAGGGTGGGGGAGAACCGTATATAAGTGCAGTAGTCGCCGTGAACGTTCTTTTTCGCAACG
GGTTTGCCGCCAGAACACAGGTAAGTGCCGTGTGTGGTTCCCGCGGGCCTGGCCTCTTTACGGGTTATGGCCC
TTGCGTGCCTTGAATTACTTCCACCTGGCTGCAGTACGTGATTCTTGATCCCGAGCTTCGGGTTGGAAGTGGGT
GGGAGAGTTCGAGGCCTTGCGCTTAAGGAGCCCCTTCGCCTCGTGCTTGAGTTGAGGCCTGGCCTGGGCGCTG
GGGCCGCCGCGTGCGAATCTGGTGGCACCTTCGCGCCTGTCTCGCTGCTTTCGATAAGTCTCTAGCCATTTAAA
ATTTTTGATGACCTGCTGCGACGCTTTTTTTCTGGCAAGATAGTCTTGTAAATGCGGGCCAAGATCTGCACACTG
GTATTTCGGTTTTTGGGGCCGCGGGCGGCGACGGGGCCCGTGCGTCCCAGCGCACATGTTCGGCGAGGCGGG
GCCTGCGAGCGCGGCCACCGAGAATCGGACGGGGGTAGTCTCAAGCTGGCCGGCCTGCTCTGGTGCCTGGCC
TCGCGCCGCCGTGTATCGCCCCGCCCTGGGCGGCAAGGCTGGCCCGGTCGGCACCAGTTGCGTGAGCGGAAA
GATGGCCGCTTCCCGGCCCTGCTGCAGGGAGCTCAAAATGGAGGACGCGGCGCTCGGGAGAGCGGGCGGGT
GAGTCACCCACACAAAGGAAAAGGGCCTTTCCGTCCTCAGCCGTCGCTTCATGTGACTCCACGGAGTACCGGG
CGCCGTCCAGGCACCTCGATTAGTTCTCGAGCTTTTGGAGTACGTCGTCTTTAGGTTGGGGGGAGGGGTTTTAT
GCGATGGAGTTTCCCCACACTGAGTGGGTGGAGACTGAAGTTAGGCCAGCTTGGCACTTGATGTAATTCTCCTT
GGAATTTGCCCTTTTTGAGTTTGGATCTTGGTTCATTCTCAAGCCTCAGACAGTGGTTCAAAGTTTTTTTCTTCCA
TTTCAGGTGTCGTGACGTACGGCCACCATGAAAAGGCCGGCGGCCACGAAAAAGGCCGGCCAGGCAAAAAAGA
AAAAGGACAAGAAGTACAGCATCGGCCTGGCCATCGGCACCAACTCTGTGGGCTGGGCCGTGATCACCGACGA
GTACAAGGTGCCCAGCAAGAAATTCAAGGTGCTGGGCAACACCGACCGGCACAGCATCAAGAAGAACCTGATC
GGAGCCCTGCTGTTCGACAGCGGCGAAACAGCCGAGGCCACCCGGCTGAAGAGAACCGCCAGAAGAAGATAC
ACCAGACGGAAGAACCGGATCTGCTATCTGCAAGAGATCTTCAGCAACGAGATGGCCAAGGTGGACGACAGCT
TCTTCCACAGACTGGAAGAGTCCTTCCTGGTGGAAGAGGATAAGAAGCACGAGCGGCACCCCATCTTCGGCAA
CATCGTGGACGAGGTGGCCTACCACGAGAAGTACCCCACCATCTACCACCTGAGAAAGAAACTGGTGGACAGC
ACCGACAAGGCCGACCTGCGGCTGATCTATCTGGCCCTGGCCCACATGATCAAGTTCCGGGGCCACTTCCTGA
TCGAGGGCGACCTGAACCCCGACAACAGCGACGTGGACAAGCTGTTCATCCAGCTGGTGCAGACCTACAACCA
GCTGTTCGAGGAAAACCCCATCAACGCCAGCGGCGTGGACGCCAAGGCCATCCTGTCTGCCAGACTGAGCAAG
AGCAGACGGCTGGAAAATCTGATCGCCCAGCTGCCCGGCGAGAAGAAGAATGGCCTGTTCGGCAACCTGATTG
CCCTGAGCCTGGGCCTGACCCCCAACTTCAAGAGCAACTTCGACCTGGCCGAGGATGCCAAACTGCAGCTGAG
CAAGGACACCTACGACGACGACCTGGACAACCTGCTGGCCCAGATCGGCGACCAGTACGCCGACCTGTTTCTG
GCCGCCAAGAACCTGTCCGACGCCATCCTGCTGAGCGACATCCTGAGAGTGAACACCGAGATCACCAAGGCCC
CCCTGAGCGCCTCTATGATCAAGAGATACGACGAGCACCACCAGGACCTGACCCTGCTGAAAGCTCTCGTGCG
GCAGCAGCTGCCTGAGAAGTACAAAGAGATTTTCTTCGACCAGAGCAAGAACGGCTACGCCGGCTACATTGACG
GCGGAGCCAGCCAGGAAGAGTTCTACAAGTTCATCAAGCCCATCCTGGAAAAGATGGACGGCACCGAGGAACT
GCTCGTGAAGCTGAACAGAGAGGACCTGCTGCGGAAGCAGCGGACCTTCGACAACGGCAGCATCCCCCACCA
GATCCACCTGGGAGAGCTGCACGCCATTCTGCGGCGGCAGGAAGATTTTTACCCATTCCTGAAGGACAACCGG
GAAAAGATCGAGAAGATCCTGACCTTCCGCATCCCCTACTACGTGGGCCCTCTGGCCAGGGGAAACAGCAGATT
CGCCTGGATGACCAGAAAGAGCGAGGAAACCATCACCCCCTGGAACTTCGAGGAAGTGGTGGACAAGGGCGCT
TCCGCCCAGAGCTTCATCGAGCGGATGACCAACTTCGATAAGAACCTGCCCAACGAGAAGGTGCTGCCCAAGC
ACAGCCTGCTGTACGAGTACTTCACCGTGTATAACGAGCTGACCAAAGTGAAATACGTGACCGAGGGAATGAGA
AAGCCCGCCTTCCTGAGCGGCGAGCAGAAAAAGGCCATCGTGGACCTGCTGTTCAAGACCAACCGGAAATGAC
CGTGAAGCAGCTGAAAGAGGACTACTTCAAGAAAATCGAGTGCTTCGACTCCGTGGAAATCTCCGGCGTGGAAG
ATCGGTTCAACGCCTCCCTGGGCACATACCACGATCTGCTGAAAATTATCAAGGACAAGGACTTCCTGGACAAT
GAGGAAAACGAGGACATTCTGGAAGATATCGTGCTGACCCTGACACTGTTTGAGGACAGAGAGATGATCGAGGA
ACGGCTGAAAACCTATGCCCACCTGTTCGACGACAAAGTGATGAAGCAGCTGAAGCGGCGGAGATACACCGGC
TGGGGCAGGCTGAGCCGGAAGCTGATCAACGGCATCCGGGACAAGCAGTCCGGCAAGACAATCCTGGATTTCC
TGAAGTCCGACGGCTTCGCCAACAGAAACTTCATGCAGCTGATCCACGACGACAGCCTGACCTTTAAAGAGGAC
ATCCAGAAAGCCCAGGTGTCCGGCCAGGGCGATAGCCTGCACGAGCACATTGCCAATCTGGCCGGCAGCCCC
GCCATTAAGAAGGGCATCCTGCAGACAGTGAAGGTGGTGGACGAGCTCGTGAAAGTGATGGGCCGGCACAAGC
CCGAGAACATCGTGATCGAAATGGCCAGAGAGAACCAGACCACCCAGAAGGGACAGAAGAACAGCCGCGAGAG
AATGAAGCGGATCGAAGAGGGCATCAAAGAGCTGGGCAGCCAGATCCTGAAAGAACACCCCGTGGAAAACACC
CAGCTGCAGAACGAGAAGCTGTACCTGTACTACCTGCAGAATGGGCGGGATATGTACGTGGACCAGGAACTGG
ACATCAACCGGCTGTCCGACTACGATGTGGACCACATCGTGCCTCAGAGCTTTCTGAAGGACGACTCCATCGAC
AACAAGGTGCTGACCAGAAGCGACAAGGCCCGGGGCAAGAGCGACAACGTGCCCTCCGAAGAGGTCGTGAAG
AAGATGAAGAACTACTGGCGGCAGCTGCTGAACGCCAAGCTGATTACCCAGAGAAAGTTCGACAATCTGACCAA
GGCCGAGAGAGGCGGCCTGAGCGAACTGGATAAGGCCGGCTTCATCAAGAGACAGCTGGTGGAAACCCGGCA
GATCACAAAGCACGTGGCACAGATCCTGGACTCCCGGATGAACACTAAGTACGACGAGAATGACAAGCTGATCC
GGGAAGTGAAAGTGATCACCCTGAAGTCCAAGCTGGTGTCCGATTTCCGGAAGGATTTCCAGTTTTACAAAGTG
CGCGAGATCAACAACTACCACCACGCCCACGACGCCTACCTGAACGCCGTCGTGGGAACCGCCCTGATCAAAA
AGTACCCTAAGCTGGAAAGCGAGTTCGTGTACGGCGACTACAAGGTGTACGACGTGCGGAAGATGATCGCCAA
GAGCGAGCAGGAAATCGGCAAGGCTACCGCCAAGTACTTCTTCTACAGCAACATCATGAACTTTTTCAAGACCG
AGATTACCCTGGCCAACGGCGAGATCCGGAAGCGGCCTCTGATCGAGACAAACGGCGAAACCGGGGAGATCGT
GTGGGATAAGGGCCGGGATTTTGCCACCGTGCGGAAAGTGCTGAGCATGCCCCAAGTGAATATCGTGAAAAAG
ACCGAGGTGCAGACAGGCGGCTTCAGCAAAGAGTCTATCCTGCCCAAGAGGAACAGCGATAAGCTGATCGCCA
GAAAGAAGGACTGGGACCCTAAGAAGTACGGCGGCTTCGACAGCCCCACCGTGGCCTATTCTGTGCTGGTGGT
GGCCAAAGTGGAAAAGGGCAAGTCCAAGAAACTGAAGAGTGTGAAAGAGCTGCTGGGGATCACCATCATGGAA
AGAAGCAGCTTCGAGAAGAATCCCATCGACTTTCTGGAAGCCAAGGGCTACAAAGAAGTGAAAAAGGACCTGAT
CATCAAGCTGCCTAAGTACTCCCTGTTCGAGCTGGAAAACGGCCGGAAGAGAATGCTGGCCTCTGCCGGCGAA
CTGCAGAAGGGAAACGAACTGGCCCTGCCCTCCAAATATGTGAACTTCCTGTACCTGGCCAGCCACTATGAGAA
GCTGAAGGGCTCCCCCGAGGATAATGAGCAGAAACAGCTGTTTGTGGAACAGCACAAGCACTACCTGGACGAG
ATCATCGAGCAGATCAGCGAGTTCTCCAAGAGAGTGATCCTGGCCGACGCTAATCTGGACAAAGTGCTGTCCGC
CTACAACAAGCACCGGGATAAGCCCATCAGAGAGCAGGCCGAGAATATCATCCACCTGTTTACCCTGACCAATC
TGGGAGCCCCTGCCGCCTTCAAGTACTTTGACACCACCATCGACCGGAAGAGGTACACCAGCACCAAAGAGGT
GCTGGACGCCACCCTGATCCACCAGAGCATCACCGGCCTGTACGAGACACGGATCGACCTGTCTCAGCTGGGA
GGCGACAGCGCTGGAGGAGGTGGAAGCGGAGGAGGAGGAAGCGGAGGAGGAGGTAGCGGACCTAAGAAAAA
GAGGAAGGTGGCGGCCGCTGGATCCGGACGGGCTGACGCATTGGACGATTTTGATCTGGATATGCTGGGAAGT
GACGCCCTCGATGATTTTGACCTTGACATGCTTGGTTCGGATGCCCTTGATGACTTTGACCTCGACATGCTCGG
CAGTGACGCCCTTGATGATTTCGACCTGGACATGCTGATTAACTGTACAGGCAGTGGAGAGGGCAGAGGAAGTC
TGCTAACATGCGGTGACGTCGAGGAGAATCCTGGCCCAATGGCCAAGCCTTTGTCTCAAGAAGAATCCACCCTC
ATTGAAAGAGCAACGGCTACAATCAACAGCATCCCCATCTCTGAAGACTACAGCGTCGCCAGCGCAGCTCTCTC
TAGCGACGGCCGCATCTTCACTGGTGTCAATGTATATCATTTTACTGGGGGACCTTGTGCAGAACTCGTGGTGC
TGGGCACTGCTGCTGCTGCGGCAGCTGGCAACCTGACTTGTATCGTCGCGATCGGAAATGAGAACAGGGGCAT
CTTGAGCCCCTGCGGACGGTGCCGACAGGTGCTTCTCGATCTGCATCCTGGGATCAAAGCCATAGTGAAGGAC
AGTGATGGACAGCCGACGGCAGTTGGGATTCGTGAATTGCTGCCCTCTGGTTATGTGTGGGAGGGCTAAGAATT
CGATATCAAGCTTATCGGTAATCAACCTCTGGATTACAAAATTTGTGAAAGATTGACTGGTATTCTTAACTATGTT
GCTCCTTTTACGCTATGTGGATACGCTGCTTTAATGCCTTTGTATCATGCTATTGCTTCCCGTATGGCTTTCATTT
TCTCCTCCTTGTATAAATCCTGGTTGCTGTCTCTTTATGAGGAGTTGTGGCCCGTTGTCAGGCAACGTGGCGTGG
TGTGCACTGTGTTTGCTGACGCAACCCCCACTGGTTGGGGCATTGCCACCACCTGTCAGCTCCTTTCCGGGACT
TTCGCTTTCCCCCTCCCTATTGCCACGGCGGAACTCATCGCCGCCTGCCTTGCCCGCTGCTGGACAGGGGCTC
GGCTGTTGGGCACTGACAATTCCGTGGTGTTGTCGGGGAAATCATCGTCCTTTCCTTGGCTGCTCGCCTGTGTT
GCCACCTGGATTCTGCGCGGGACGTCCTTCTGCTACGTCCCTTCGGCCCTCAATCCAGCGGACCTTCCTTCCCG
CGGCCTGCTGCCGGCTCTGCGGCCTCTTCCGCGTCTTCGCCTTCGCCCTCAGACGAGTCGGATCTCCCTTTGG
GCCGCCTCCCCGCATCGATACCGTCGACCTCGAGACCTAGAAAAACATGGAGCAATCACAAGTAGCAATACAGC
AGCTACCAATGCTGATTGTGCCTGGCTAGAAGCACAAGAGGAGGAGGAGGTGGGTTTTCCAGTCACACCTCAG
GTACCTTTAAGACCAATGACTTACAAGGCAGCTGTAGATCTTAGCCACTTTTTAAAAGAAAAGGGGGGACTGGAA
GGGCTAATTCACTCCCAACGAAGACAAGATATCCTTGATCTGTGGATCTACCACACACAAGGCTACTTCCCTGAT
TGGCAGAACTACACACCAGGGCCAGGGATCAGATATCCACTGACCTTTGGATGGTGCTACAAGCTAGTACCAGT
TGAGCAAGAGAAGGTAGAAGAAGCCAATGAAGGAGAGAACACCCGCTTGTTACACCCTGTGAGCCTGCATGGG
ATGGATGACCCGGAGAGAGAAGTATTAGAGTGGAGGTTTGACAGCCGCCTAGCATTTCATCACATGGCCCGAGA
GCTGCATCCGGACTGTACTGGGTCTCTCTGGTTAGACCAGATCTGAGCCTGGGAGCTCTCTGGCTAACTAGGGA
ACCCACTGCTTAAGCCTCAATAAAGCTTGCCTTGAGTGCTTCAAGTAGTGTGTGCCCGTCTGTTGTGTGACTCTG
GTAACTAGAGATCCCTCAGACCCTTTTAGTCAGTGTGGAAAATCTCTAGCAGGGCCCGTTTAAACCCGCTGATCA
GCCTCGACTGTGCCTTCTAGTTGCCAGCCATCTGTTGTTTGCCCCTCCCCCGTGCCTTCCTTGACCCTGGAAGG
TGCCACTCCCACTGTCCTTTCCTAATAAAATGAGGAAATTGCATCGCATTGTCTGAGTAGGTGTCATTCTATTCTG
GGGGGTGGGGTGGGGCAGGACAGCAAGGGGGAGGATTGGGAAGACAATAGCAGGCATGCTGGGGATGCGGT
GGGCTCTATGGCTTCTGAGGCGGAAAGAACCAGCTGGGGCTCTAGGGGGTATCCCCACGCGCCCTGTAGCGG
CGCATTAAGCGCGGCGGGTGTGGTGGTTACGCGCAGCGTGACCGCTACACTTGCCAGCGCCCTAGCGCCCGC
TCCTTTCGCTTTCTTCCCTTCCTTTCTCGCCACGTTCGCCGGCTTTCCCCGTCAAGCTCTAAATCGGGGGCTCCC
TTTAGGGTTCCGATTTAGTGCTTTACGGCACCTCGACCCCAAAAAACTTGATTAGGGTGATGGTTCACGTAGTGG
GCCATCGCCCTGATAGACGGTTTTTCGCCCTTTGACGTTGGAGTCCACGTTCTTTAATAGTGGACTCTTGTTCCA
AACTGGAACAACACTCAACCCTATCTCGGTCTATTCTTTTGATTTATAAGGGATTTTGCCGATTTCGGCCTATTGG
TTAAAAAATGAGCTGATTTAACAAAAATTTAACGCGAATTAATTCTGTGGAATGTGTGTCAGTTAGGGTGTGGAAA
GTCCCCAGGCTCCCCAGCAGGCAGAAGTATGCAAAGCATGCATCTCAATTAGTCAGCAACCAGGTGTGGAAAGT
CCCCAGGCTCCCCAGCAGGCAGAAGTATGCAAAGCATGCATCTCAATTAGTCAGCAACCATAGTCCCGCCCCTA
ACTCCGCCCATCCCGCCCCTAACTCCGCCCAGTTCCGCCCATTCTCCGCCCCATGGCTGACTAATTTTTTTTATT
TATGCAGAGGCCGAGGCCGCCTCTGCCTCTGAGCTATTCCAGAAGTAGTGAGGAGGCTTTTTTGGAGGCCTAG
GCTTTTGCAAAAAGCTCCCGGGAGCTTGTATATCCATTTTCGGATCTGATCAGCACGTGTTGACAATTAATCATC
GGCATAGTATATCGGCATAGTATAATACGACAAGGTGAGGAACTAAACCATGGCCAAGTTGACCAGTGCCGTTC
CGGTGCTCACCGCGCGCGACGTCGCCGGAGCGGTCGAGTTCTGGACCGACCGGCTCGGGTTCTCCCGGGACT
TCGTGGAGGACGACTTCGCCGGTGTGGTCCGGGACGACGTGACCCTGTTCATCAGCGCGGTCCAGGACCAGG
TGGTGCCGGACAACACCCTGGCCTGGGTGTGGGTGCGCGGCCTGGACGAGCTGTACGCCGAGTGGTCGGAGG
TCGTGTCCACGAACTTCCGGGACGCCTCCGGGCCGGCCATGACCGAGATCGGCGAGCAGCCGTGGGGGGGG
GAGTTCGCCCTGCGCGACCCGGCCGGCAACTGCGTGCACTTCGTGGCCGAGGAGCAGGACTGACACGTGCTA
CGAGATTTCGATTCCACCGCCGCCTTCTATGAAAGGTTGGGCTTCGGAATCGTTTTCCGGGACGCCGGCTGGAT
GATCCTCCAGCGCGGGGATCTCATGCTGGAGTTCTTCGCCCACCCCAACTTGTTTATTGCAGCTTATAATGGTTA
CAAATAAAGCAATAGCATCACAAATTTCACAAATAAAGCATTTTTTTCACTGCATTCTAGTTGTGGTTTGTCCAAAC
TCATCAATGTATCTTATCATGTCTGTATACCGTCGACCTCTAGCTAGAGCTTGGCGTAATCATGGTCATAGCTGTT
TCCTGTGTGAAATTGTTATCCGCTCACAATTCCACACAACATACGAGCCGGAAGCATAAAGTGTAAAGCCTGGGG
TGCCTAATGAGTGAGCTAACTCACATTAATTGCGTTGCGCTCACTGCCCGCTTTCCAGTCGGGAAACCTGTCGT
GCCAGCTGCATTAATGAATCGGCCAACGCGCGGGGAGAGGCGGTTTGCGTATTGGGCGCTCTTCCGCTTCCTC
GCTCACTGACTCGCTGCGCTCGGTCGTTCGGCTGCGGCGAGCGGTATCAGCTCACTCAAAGGCGGTAATACGG
TTATCCACAGAATCAGGGGATAACGCAGGAAAGAACATGTGAGCAAAAGGCCAGCAAAAGGCCAGGAACCGTAA
AAAGGCCGCGTTGCTGGCGTTTTTCCATAGGCTCCGCCCCCCTGACGAGCATCACAAAAATCGACGCTCAAGTC
AGAGGTGGCGAAACCCGACAGGACTATAAAGATACCAGGCGTTTCCCCCTGGAAGCTCCCTCGTGCGCTCTCC
TGTTCCGACCCTGCCGCTTACCGGATACCTGTCCGCCTTTCTCCCTTCGGGAAGCGTGGCGCTTTCTCATAGCT
CACGCTGTAGGTATCTCAGTTCGGTGTAGGTCGTTCGCTCCAAGCTGGGCTGTGTGCACGAACCCCCCGTTCAG
CCCGACCGCTGCGCCTTATCCGGTAACTATCGTCTTGAGTCCAACCCGGTAAGACACGACTTATCGCCACTGGC
AGCAGCCACTGGTAACAGGATTAGCAGAGCGAGGTATGTAGGCGGTGCTACAGAGTTCTTGAAGTGGTGGCCT
AACTACGGCTACACTAGAAGAACAGTATTTGGTATCTGCGCTCTGCTGAAGCCAGTTACCTTCGGAAAAAGAGTT
GGTAGCTCTTGATCCGGCAAACAAACCACCGCTGGTAGCGGTGGTTTTTTTGTTTGCAAGCAGCAGATTACGCG
CAGAAAAAAAGGATCTCAAGAAGATCCTTTGATCTTTTCTACGGGGTCTGACGCTCAGTGGAACGAAAACTCACG
TTAAGGGATTTTGGTCATGAGATTATCAAAAAGGATCTTCACCTAGATCCTTTTAAATTAAAAATGAAGTTTTAAAT
CAATCTAAAGTATATATGAGTAAACTTGGTCTGACAGTTACCAATGCTTAATCAGTGAGGCACCTATCTCAGCGAT
CTGTCTATTTCGTTCATCCATAGTTGCCTGACTCCCCGTCGTGTAGATAACTACGATACGGGAGGGCTTACCATC
TGGCCCCAGTGCTGCAATGATACCGCGAGACCCACGCTCACCGGCTCCAGATTTATCAGCAATAAACCAGCCAG
CCGGAAGGGCCGAGCGCAGAAGTGGTCCTGCAACTTTATCCGCCTCCATCCAGTCTATTAATTGTTGCCGGGAA
GCTAGAGTAAGTAGTTCGCCAGTTAATAGTTTGCGCAACGTTGTTGCCATTGCTACAGGCATCGTGGTGTCACG
CTCGTCGTTTGGTATGGCTTCATTCAGCTCCGGTTCCCAACGATCAAGGCGAGTTACATGATCCCCCATGTTGTG
CAAAAAAGCGGTTAGCTCCTTCGGTCCTCCGATCGTTGTCAGAAGTAAGTTGGCCGCAGTGTTATCACTCATGGT
TATGGCAGCACTGCATAATTCTCTTACTGTCATGCCATCCGTAAGATGCTTTTCTGTGACTGGTGAGTACTCAAC
CAAGTCATTCTGAGAATAGTGTATGCGGCGACCGAGTTGCTCTTGCCCGGCGTCAATACGGGATAATACCGCGC
CACATAGCAGAACTTTAAAAGTGCTCATCATTGGAAAACGTTCTTCGGGGCGAAAACTCTCAAGGATCTTACCGC
TGTTGAGATCCAGTTCGATGTAACCCACTCGTGCACCCAACTGATCTTCAGCATCTTTTACTTTCACCAGCGTTTC
TGGGTGAGCAAAAACAGGAAGGCAAAATGCCGCAAAAAAGGGAATAAGGGCGACACGGAAATGTTGAATACTCA
TACTCTTCCTTTTTCAATATTATTGAAGCATTTATCAGGGTTATTGTCTCATGAGCGGATACATATTTGAATGTATT
TAGAAAAATAAACAAATAGGGGTTCCGCGCACATTTCCCCGAAAAGTGCCACCTGAC
Nucleotide sequence of sgRNA for mouse KCNA1 (SEQ ID NO: 13)
TGCGAATACGCCCACGCGAT
Nucleotide sequence of 600 bp promoter region where sgRNAs have been designed for KCNA1 (SEQ ID NO:
14)
tgcggagagcgaagggaactggagagccatgtagatccaggctctcgcccgcccgcctccttcgggatcgaatcaagggctcccatagtgttaggagggggcga
gagtgctgtttatcgtcatttgcctcggagcttcgagagagggtggtattttgcttttccgccccgcatcctccggaactccctgcaccggagagaggacggcgtctccag
gttgctggcaaccggtgagaatgggggtagggaaggaacattttcgccgtagctgctccgtaaagcgattgtccaactgagaggggcgtcggacgagtggaccag
ggcggcgagtttgcccggcgcgtctcggatgctgctgcggcggccgccgcggctcccgccagggcactgcaaagacgacctgccgcattcccactcgggctctcc
gctgactcagcaccgcccctgcgccaagccagccggccaggtagggggttccccagctcggggatgcagaagcgggggttggggggaccggggggggagg
ccgggggtgcggggatgctgtccgggaccctgagcttcccccggcgtctctcggcgcttttccgatctctagtt
Nucleotide sequence of 600 bp promoter region where sgRNAs have been designed for GABRA5 (SEQ ID NO:
15)
cgtcaccccagaggcgctctccgacctgcagcccccagggctcctggccctttcccgtttgccactgcggcttgttgtcaagaaatggaacttcagaaaacccccaga
tatacactgcgttaggtaaggatttcattctaatcgagtccaatgtgaccctggctttccctcccgtagttatgcattcctgtctatgagtgagatgaaaagaatgtccacag
gccagcttctttcagaagcgcctaagagatgcgcatgtaaggggtgccatggagcacccgggaaggacccaggcctgggcagggaggcgttggggccggctcta
gggagcaaagctgtcggagtccaggcctctatcacccgactgctgacactgccctcccatccctgctctacaagcgggcggtggtgactacacgaggcgccgaag
atgctgttgagggccctggagaaacttcagcagaacagggcctctccccttgcaggccgagccgggggccctgcgccctccccctccgcccagctcggccaaggg
cgcatttgctgagcgtctggcggcctctaccggagcacctctgcagagggccgatcctccagccc
Nucleotide sequence of 600 bp promoter region where sgRNAs have been designed for KCNA2 (SEQ ID NO:
16)
aagtgcagctggcagcataaccatgtctggtaaatagcgcgggttggtaggacctgaaccacttgggacggccgggctgcattcgcctcttcggcacagaataaca
aacggctttgctgcagagagggctttccccttcgctggggccgtgggctgccgccgagcccccgcgcttaaaaggaagctgagatctggggggcagcctggcgc
aggctactccccacccccagagatcaggttccgggattttgggttggacactgagcctcggcggtccctcggctggacgccgggggcttaagagctgaactgcgctt
gggcccgcagcaggagccgaccgcgcgggcaggagggggttaaggtggcgctagcggccgcggccagcgggagggtctggtcctctgcgcggaggcgagc
gctgagtgcgccgaacggaatcccggccggagcccggggcgatggggagagggcccagacccctccccgccctggggccggcgggattgggtcggcagggg
gccagtccggaagccggcttcctccaggctccccctctcgctgctgccaagccgcctcgcagctaggcaggcggagcgttt
Nucleotide sequence of 600 bp promoter region where sgRNAs have been designed for LGI1 (SEQ ID NO: 17)
ggtggattatacacagagagggtcccgcacttctgtttcccttccttgtcatggaaggagagaatgaattacgtgggggacccagggggataggaaaatcaatcattc
atgacagttaataagtgtcagaaaagtatgtactcacattcatcccctgaaagtcacattcttcatctgttctgatttgtctttcactgatggcattagccaggtaggctcagc
aagaaacatcaaaaggttttagcccaatattgtggagagagtttcatttagcttcattttttccagccggggctggctccaaagctagtttttcttactaggttgtttgctacatg
aaaagcagactcccagaggtttctgagattgccgacatcctatgcaagatgactgctcccacccacccgcccacccactcactaataagacataatgccgtcctatttt
tggtaacaattaaagggcctcccggtgaaagcagaaagctgtttattttctgtgacatcacttcactttgccttcgaaggctggtctgtgctcagtgttttcgtggtgatgcaa
gtcggctctctcctccagcagttggatccctcccatctc
Nucleotide sequence of 600 bp promoter region where sgRNAs have been designed for KCNC1 (SEQ ID NO:
18)
aaggagtccaaaggggttaataggggtccaggattgattgttagtggagggcgtagaggataacgtggtgtgtgtgtgtgtgtgtgtgtgttggggttcatgcaagacat
tacccatggaaggaacatggggcctccaggttccgcgagaagggtcggtattaaaggattccttggagcggtcagcactggtccgggccagggtgtctctgatgac
aaaactccgggagagctttgtctcaccagggatcagatggtccctggtttggaaggcaaggggagggtgccaacgcccttctcacctcagtctgacccgggggcgc
gggcccagacgtctctcggagcccccgcccctggagtggcgttccccgagggcggaccgtggggggtcccccgggagcagcaggagccgcgcggggggg
cgcccccagcgccgaggttgagggaggccgggctcggtgcggggctgggaggggggcgcggaatcagggctttttaggacccagcgcggcgccttcctccggg
ggcgagtgcggctgcgcgcgccgtgtgcccgtgtccggagagcggcgggctggacgcggaccgcgcgaacgagc
Nucleotide sequence of 600 bp promoter region where sgRNAs have been designed for KCNMA1 (SEQ ID NO:
19)
acggggacgaggaggagtcggaggcggcaaggaggaagagcgagcggaggccgaggggctcagcggcgtggcgacaggactagggggtcccgagaac
atgggctagcaggcggccacgggccggcggccggacgcggtgaacctgccgcggccgggcgcgcactggcgcggcgagccggagccgagcgcagccggg
ggaggagggctggcgcaggggcgcccgggcggagggggccgattatccattattaacgagttaccacctaataagcggagagcggctcgttagccgcgcggga
ggcgctcggggaagggggtcaccggccgagcgcagcgcacacccgtggcgcacgggggcggcgcggcgccgaggacacccgggaccgcgcgcggagc
cggggcgggcccgggggcggcgcagaccccgggcgcgggcggcccgcggcgccccctggctctcggcgctcggggccagcgcagcccggggcgagcggg
gcgcgggccgggggggggagctgcccgcgcactccatccccctcccccccggggggggggggctcgctgtatatatctcggcgcaccccgccaggtcg
c
Nucleotide sequence of 600 bp promoter region where sgRNAs have been designed for KCNK2 (SEQ ID NO:
20)
atttagataaggtaagataaaaaataaaagcctatatggaacgcagccaacgattcatctgtttgcattaataggttccagcaatggttctacaggcacggaaagcca
agccggtttgccactgcacttagcaagcacatgagcttaaaaataaacttttgacaatgcagatctctttgtccttttgggaatggaaaacattatgtacttcaaagcatac
taagcctgatttgaaaatatagttgggatattgttactgtggcagttgggagggtctttagccttcacacagtgcgtggatgcttcgtgtgtaaatgcttgagccacaaactt
gtgagaataagtgacgctggcaactttgatatgctcattcataaggaagaaacttctgtcttttaaattctctggaacaactgggatatagttcctcattttaatcagggaatt
tcttcctgaaccagactgtaaaaacagaggatttgagtagcacatttcacttgcatacagcagcgtttgttcgttttgagtgtttttgtacaggaaactgatctacagggtaa
cattcacacacaaaaaggaaacagtatgggacgatggctt
Nucleotide sequence of 600 bp promoter region where sgRNAs have been designed for KCNQ2 (SEQ ID NO:
21)
cgtccactcccagggcccagctgagaagactccagtcctgctcaggcggctgggcaccgctctgggaccccaggagcgctggggccaccaggcaggtccacttg
gttagtactaccggactcaaaggtgaccgcagggtcagtgtgcacatggccgggggattgggcaggctcagcccagagctctggtcccggggccttggtcccttct
gcctccccctcctctccccctgccctcccctccccctcccccactccccctcctctcccccctcccctccccctccactcctgtctcccccctccactcctgtctcccctctcc
ccgtccccgccactctcctcccctcccattcccctctcctcccctccccctcccctcctgtctcccctctccccgtcccctctccctcccctcccctccctttccctcttctctcct
cccctctcctctccttcccccctcccctcccctccccgtcccccctctcccctcccttcccctccctctcttctcctcccctctccttcgactggcgtcgcgggggttaacgcg
gggcggggcgaggcggcgggcggagccggcgcggccgcgggcc
Nucleotide sequence of 600 bp promoter region where sgRNAs have been designed for KCNQ3 (SEQ ID NO:
22)
aatcaaagattctgactgcatttcttcagtcctttgcccacccagacaggtgaaggtgctattcaaagattgggggaggagagggccgcggcatccaccatgaacca
cgaactagagggaagagggaagagggaagagggaagagggagtcacgagcttcgctaccacagagcaggtgcgttcgcggtgcgcccggccttgaccaacc
cgacaacttggcttttacctctgaagccgaggagcaggggtagggggtgagggaaattcacaaagctgcaaccacagagccaatgtttggtgggcgacaaccccc
cagtccctcctcccttcctcttcttcccccaactgcccgccgtcacgccccatccaggggaagccccaacgcccacgggagctccaggagccgggctctgcagccg
cctggcgcactgcctggttgcaacgggggcggcggtagcccaggcgatcctgggtccccagacaatcagcggtgggggtcggcgggaagaggcggggcgccg
ccgcccgggcctcccgccgcgacggggcgggacaatggggccccaccccggggaaggagggagggagggacgcggcgtg
Nucleotide sequence of 600 bp promoter region where sgRNAs have been designed for KCNJ6 (SEQ ID NO:
23)
tcagtaaggtcttccttttaatgaaaagcagcccccaaatcattttcttttctaacaaaaagcaacctggaaaatcgagctgcagacacagacaagcaagctgaaagc
ttgcacaggcaaataccggcagttgtgccaataaaaatatactacctggggccggcgctgtggctcacgcctgtaatcccagctactcaggaggctgaggcaggag
aatcgcctgaacttaggaggcggaggctgtggtgagccaagatggcgccattgcactccagcctgggcaacaagagcgaaactccgactcaaaaagcgacaac
agcagcaacaacaacaacaaaaaacactacctgggattaggcatgttctaaatggcagctccatcttctctttttgccacccatgtttacagaaacgagtggacaaga
cggcccctgccaagtgggaagcctatttgcataacaagattaggggggggaccagccttccctgcgcgctacgtaaacgtcacccctggtcgaaccaatctctgg
gctccacgtaaatcagacaccgcctcctcaagcctgcccgtaaaacctgctgccgtcagtcacgggcc
Nucleotide sequence of 600 bp promoter region where sgRNAs have been designed for GRM3 (SEQ ID NO:
24)
tgcggagagcgaagggaactggagagccatgtagatccaggctctcgcccgcccgcctccttcgggatcgaatcaagggctcccatagtgttaggagggggcga
gagtgctgtttatcgtcatttgcctcggagcttcgagagagggtggtattttgcttttccgccccgcatcctccggaactccctgcaccggagagaggacggcgtctccag
gttgctggcaaccggtgagaatgggggtagggaaggaacattttcgccgtagctgctccgtaaagcgattgtccaactgagaggggcgtcggacgagtggaccag
ggcggcgagtttgcccggcgcgtctcggatgctgctgcggcggccgccgcggctcccgccagggcactgcaaagacgacctgccgcattcccactcgggctctcc
gctgactcagcaccgcccctgcgccaagccagccggccaggtagggggttccccagctcggggatgcagaagcgggggttggggggaccggggggggagg
ccgggggtgcggggatgctgtccgggaccctgagcttcccccggcgtctctcggcgcttttccgatctctagtt
Nucleotide sequence of 600 bp promoter region where sgRNAs have been designed for GDNT (SEQ ID NO:
25)
gttgggacccgaggcaggggaatgcgcttgattttatttccaaagagaaacaccgtccttgcttgggccgagggctcgttcaggggcctataggagctaccgggaca
agaaggggaggtctctggttggggtggaggacgaagggtgggaactacccgattgccccccaggaatgggggatgttgcgcaccagtagaggggactggacag
gaatcgtggtggtgggggtggggggttaactggaggggacagcagccctgcttgaaactctgacccctaagaccgtgtggtggagaagggcagctgcaacctgaa
ccaggagtgcgagctgctcctggggcgcgctgaggagggagaagcgaactggggacttgcaaggagggcaggagtgcccgaggagccgctggcctgcagcg
gtgccggaggagggcggtgacgaggttggagaggggcgcagggacccgcagggagcccaggcttaacgtgcattctgcggttctctcccccacctcccgcctgc
ccgcgcaggtgccgccgccggacgggactttaagatgaagttatgggatgtcgtggctgtctgcctggtgctgctccaca
Nucleotide sequence of 600 bp promoter region where sgRNAs have been designed for NPY (SEQ ID NO: 26)
tggggagcgcagctttgggaccctctagccggagacttccggcagctgcctccgacttgttctaagtacaggaaaaatctgtgcgcccagttgcctcactccaacagc
gcgcagttgtgcccggcgaggatgccgcgctagtcgtggagatgccccaccacaaagaggattcaggtgcttcctactccggcacccagtgggttggtagtcctgttg
gcaggagacaagaatcgtctgggctgctcctatctctggcaggactagacggggcgtgaaggaaagaaggaaagaaggaaagcagggatcgggcactgcccg
agggcagatacttgggctttggtgttgtccagcgcgctcggagtgcgctgcctcgctcacgcggtcccaggccccgcttcttcaggcagtgcctggggcgggagggtt
ggggtgtgggtggctccctaagtcgacactcgtgcggctgcggttccagccccctccccccgccactcaggggcgggaagtggggggggagtcacccaagcgt
gactgcccgaggcccctcctgccgcggcgaggaagctccataaaagccctgtcgcgacccgctctctgc
Nucleotide sequence of 600 bp promoter region where sgRNAs have been designed for NPY2R (SEQ ID NO:
27)
gagcacagggaccgcccagctagaggagcaccagcgcactgcgccccagccctgggcgagggtgcggaggatttgttctcggtgcaatcctgctggcgcttttcc
ggggttctgcgcggatccagctccccatctctgctcctacacacacaaaagaaaacaactctcgattggaagttgtggaattttctcagcccctacgaggcgcgggga
ttctccagccccggccctcctcccgccagcctgaggtctccttcgctcgcctgccttgctagggaccgcagtccctcagccgcagctgggtctgtccgccccgcctttgc
cctcgccttttcccggggcggatttggtgaagtcggcctcaagtccaggaggtctgtcttcgccgggccagctctcgcggaactggggggtagagagcaaagggag
agattcgtggaagggaagggaggtaggggtggcgcaaacgcccagagtatcaaacttgggggtggcacagtaggtgacagcagcagctgcaggtggtggctgg
ggacccgcgagggggcgcccctctgggtagggtctggctgagcgggcttgcaagcccgggaggcggct
Nucleotide sequence of 600 bp promoter region where sgRNAs have been designed for GALP (SEQ ID NO:
28)
tccggcctagggacgcagccatgaacaagacacagttgacacccctcatggggtctcctttagccagggtggtaggtggggggcggggagatagacagctcaca
agtaaacaaataaacagggtctaccgtgcaagacagaagaaatgcaactcagtgagggagctgcggaggcttggagggattgatgggggcagaggggacag
ggctacggagacaccagtggcaggtggagacaaccaaggaagacacaggtcaaggcccagacgcagataagagggagggagggagccctcgaatagctg
caaagtctggaacaggacagctggaagataaaggggcacagaaggagggggaagggcagggtctaccaggggaaaccaaggcacagcagcatttcccgcg
atgaagtgtgtgttttgacctcacagaccagcgtttgaaagcccctggagtggatgactgttcccccacctccatcctcttcactccctctcccttcttctaatcccctcccttt
cccccctcccttctattgtctcctcagaaggcataaaagctcagggggcgtgaaagagtccaggcgctggagcgaggagcc
Nucleotide sequence of 600 bp promoter region where sgRNAs have been designed for GALR1 (SEQ ID NO:
29)
aaaagagctctcgccctgtggacgactcggaatccctggaaaagccgggagggagtcggaggcgccagcccactggggaggtggcgctgggcgcgcgggatg
cgcggggagccttctctgcaggagccgcacagtgcactgctgcgcgctgggcagtgcggggaagcgccgcgggaaggagcggctccgagcaacaggtgcagc
acgcagcccctccgggagccagggaaaaccgccggcgaagatctggagcggtaaggcggagagaagggtctttccacctgcgcggctgcagccggcggatcc
ctcttcccaggctccgtggtcgcgcagcgggcggaggcgcccgggaaggggaccccagtgctctcgagatcaccgtcccttcccgagaaggtccagctccgggct
cccgaacccaccctctctcagaaggtcccggcgcaaagacggtgccaccaggcacggccaccggatccccgctcccgctggctcgcgcctcgggggaagctca
gactcctaaactcgcactctccgtgctttgcgccgggacccctggccacccccggcgcctactatcccgccctccctccccgcgcg
Nucleotide sequence of 600 bp promoter region where sgRNAs have been designed for PDYN (SEQ ID NO:
30)
actgtctcagcctctgtctgtctccacgtctgtctgtctgtggatcagtgtgttttgagtctgacagtctacctggctggtttccttttttcttgctctgtccctctctccttgtgtttctac
ccatctccctatctctgccactctctgtctctgttttttttctctttctcccctcctttgtatcactccctaggtccgacattgcctctttctcgatttccgattctctctgagtctctctctc
tctctctctttctctaactcttctgtctctgtccttccctgtcttctttttcctgtgacactctcctggaaacgcatcaaaaactgaagtggccggatttcaagtgacaaacagcac
tacacccagaatccgccccctccccaacacggctgccttcctcctccacatccctgtcacgaagagaagcctattgtgtcaggcccagggagttcgagttgaagggc
ctgggggtctgtgctctgactgctctcagccacttccccattggctcccagcagcctgtgctcagcaagggctgagcgacaggggaggctctcgtccataaaagggg
ggaagaggcaccagaactgcc
Nucleotide sequence of 600 bp promoter region where sgRNAs have been designed for BDNF (SEQ ID NO:
31)
gagtaaaccaatagcccccatgctctgtgcgatttcattgtgtgctcgcgttcgcaagctccgtagtgcaggaaggtgcgggaaggtgtgtctgtggcccgggaaacg
cacgccctctcccagagaacttgggtgctgggatggggaggaaggggagagttgaaagctaggggagcgagacctcggggcgtgcgattctcactcgctccctcc
cgccccagcgcccacagccggggtttctgcagagggcgcgggacgcggggttccccggggctgaggctggggctggaacacccctcgaagccgcgggcgtcct
gtccaaggcgccccaggagggcgcaggactcgcagggcgatgtcgcggggccctaggggaggaggtgaggacaggccccgggggagcggggagttccggg
cgcccctcggttccccgcgcgaggaaaagacgcggcgttccctttaagcggccgcctcgaacgggtatcggtagcgcgggcgagcggggagcggggggggg
gggcgggggggggggggcggcgccgtttgaccaatcgaagctcaaccgaagagctaaataatgtctgacccgggcgcaaggc
Nucleotide sequence of 600 bp promoter region where sgRNAs have been designed for FGF2 (SEQ ID NO: 32)
ttggtagacgacttcagcctctgtcctttaattttaaagtttatgccccacttgtacccctcgtcttttggtgatttagagattttcaaagcctgctctgacacagactcttccttgg
attgcaacttctctactttggggtggaaacggcttctccgttttgaaacgctagcggggaaaaaatgggggagaaagttgagtttaaacttttaaaagttgagtcacggct
ggttgcgcagcaaaagccccgcagtgtggagaaagcctaaacgtggtttgggtggtgcgggggttggggggggtgacttttgggggataaggggcggtggagcc
cagggaatgccaaagccctgccgcggcctccgacgcgcgccccccgcccctcgcctctcccccgcccccgactgaggccgggctccccgccggactgatgtcgc
gcgcttgcgtgttgtggccgaaccgccgaactcagaggccggccccagaaaacccgagcgagtagggggcggcgcgcaggagggaggagaactgggggcg
cgggaggctggtgggtgtggggggtggagatgtagaagatgtgacgccgcggcccggcgggt
Nucleotide sequence of 600 bp promoter region where sgRNAs have been designed for GABBR1 (SEQ ID NO:
33)
taccccttccctcgtcttttctcaattccatgtcctgtctccctttcttaggcttctgtctacccagccccaggctcccttccacgaccccaccactccctcaaaccagcctccct
tccgtacccaactcgttccctccaaaaccgtttcctctcccccacatcctcagtgcttcactgtatcgactcatactcccacttcagacctcaggcgccagccccgtttctct
cccgtcccactcgcatccttcccttcctaccctggttcctccgtgcttcagcctcccgcggctccctccgcccaccccgccctcctggcacgccccgtccccatttctcctc
ccctcgggtccccttaagtgagatccctcccttcctctttcgttcctttcctcctcgaggttgcatcccccctcccctccccgcccctccgactgtcgctcccacctcggcgct
cgcttccctccccgcccccttcctgcctccccagctcccgcccgcccccccaccccccgctgccgcgcgccgcccgtgacgtcagagccccctcccagccccacat
ctccctcctgctcctcctcctcccctccgtcggtcagtc
Nucleotide sequence of 600 bp promoter region where sgRNAs have been designed for GABBR2 (SEQ ID NO:
34)
ggacgccttcgtggaacattctcctgcccagaccttcccggccagacctccgagaagcggttccaaaccaccgtgcaggtgctacaggcagcgctcggcggagcg
gcggcggccactgcgtgtgccagcgcgcggtcccggttcccagatcgctgtccccgggcgctctggtgcctggaggtcagcggtcggcgggcagcggcagctggc
gcagcggagggccgggggcgcgtgtgtgcgtgtgctgggaaggtggccctccccgcggccgccgcagcgccagcgcctccccctcccccggcgcgcacggctc
gtccccgtccctggaggcggcccgagccgcccctgagcagcctcgccttcgcctcccgcgtttcctgccgtccgccctcccccggccgagctccaggggctgccgc
ctagcagctcccggcgggagagcggttcagagcgcgcacggggggggcggaggcggcccggtgcggggcggccgcgctggagagaggcgcgcgcggag
acgccggcccccctctccgcgtttgctcgcttgctccccgcctcccgcactccgctcgctcccaccccttcccggcgtgatt
Nucleotide sequence of 600 bp promoter region where sgRNAs have been designed for GRM3 (SEQ ID NO:
35)
gtgtctggcttcatataattcagtccttggttaatacaaagttagtatattagagtacaaaaattaatgaagtttcaatttggaaattaaacagtatgtgtttctagacatagaa
agatgcctggaattttacctttaggattttatctgtagctggcagcctattaaagctgtttccgcgtgcctttttctcttttgtgcctacgtcaccgatttaaggttcctatttatttattt
atttttaagaagaaagaagaggttctgtaggaaacattgactgtatccgacaaccatagcaggactagagaaggaccaatgagggggtgctgggggtagctttaag
aggcgaggtggtagcagaaaaggataagaagaaagataattcagcagtcccctataatcttattccacccaagaaatttgggagaatgcgaaaaagcagcagcc
cagcattcccggatgggcgtggcttttctccaggggctgtccaattgaattccttcagagggagaagattgataagggttgctaggaaacaggagcgtctgcctcccgc
ctgacccagagattgttctgcacaaaccctctccaggggctcgc
Nucleotide sequence of 600 bp promoter region where sgRNAs have been designed for GRM4 (SEQ ID NO:
36)
ccatccagtgctggagggagaccagcgggggggtgtttccctagcctggtggggttttgaggtggtaagggggctctgtggaaagtgtcccctggacaggctgtgag
atctggggcaagtggagtcacctcactgggcctcagtttctccccttgttatatacttgaatcaggagcagtggggtgtgcaaatgaacatgccacatgggggcatacg
ccacgtgcgcgcggatgtgtgaggttccagtgacgcaccaggggggagtagcgcgcccctctgcgtccctgtgctttgctgtacttttctgggtgtgtgttagggaggct
atgttcctgaccctccccctctggggtgagaaggggtccccgccatgtcctcggggtaggtgagctggcacgcgcacggggaggaggaaggggggggcttccgg
aagagggcgccggtggggtgtggtggaagggggagctgccagcagggcgggtgtggaggggggcggagcgccgcgagagccctggccttccggaggtgga
ggtgtggggtaggggggggctccaggtgctctctctttaaaaggccggcagaagcgccgtgagctt
Nucleotide sequence of 600 bp promoter region where sgRNAs have been designed for GRM7 (SEQ ID NO:
37)
tcagctcctggccctggaaacccctttgggtaaagcgtctttaagtcaagaatcaggctcctgtgtgcacgtgtggctttcttagcaaaaaactagcacaggcggctca
ggagtagagtctagctagggtcttcccgcgcccctccctcactggtttctctgcccctgcctcgctttctcccagagctaagagcctaggctccggacctagggtttggga
gcagtcagcacgacgtcctcgccccatcccgcggctgatgacacccgtgcccagaacgtgggtgtgggtagggaggcttccacagtgagttagggtcgagagcta
ggctctcgcttgctccccgcaatccctagattccctggggaccacgaaactcccattccgaggaaacctccccccattccccagccgcccacccgtttcccccccttac
ctcagcacgcagcccctccctgcgtgatgatgcaaaccagtggggagggctggcgctgggaagggtggggagagaaggagagccagcgagggagggaggg
agtgggaggaggaggagagggagccgaacgaccatttaaagcgatagcagtccctgccctctcccc
Nucleotide sequence of 600 bp promoter region where sgRNAs have been designed for GABRR1 (SEQ ID NO:
38)
tacgatctgggaacagaaccttaaaacaactgcatttcaaataacccgaaaaaaatttctctcatcaattttttttcagtcttgtgtaattaattctcattctattggatcttgggt
tagcagttgtgtgaaaccgcttttcagctatagagttatgggaatcctgactcagtttaccggtacagtctgaaagttaccaaaaccatgtcagctcagctttgaagagtc
aatagtttggagtacctaatgcggtctcttccacgaggctctgagactgtcttttgatgaagacacaagatccggcctgtagattatagcagagtcttaaagtaagcatca
aagcaaaagaaaaactgtctacaaataacacagacttgaggctacagttaatttattactggtatttttcaaatgtggacagtgcagcaaggttcatgataagaacaat
gcaactgacaaggaaatttacttgtttctgcgccaaacaaagacaaaaaaacctcttccccagttgccctcccaatctcagccatatagacagcccacgcaggtacc
gagccctggggtttcagggattcagccacaggaagtgggggcagg
Nucleotide sequence of 600 bp promoter region where sgRNAs have been designed for GABRR3 (SEQ ID NO:
39)
aaatggctttcttcctaagtcctagtaaaaaggtcaaccgttgctgtgttgctcaccttgtgctattccagttgaagaagattaatttcaatgacatgaccatttattggtgcttt
gcatatgtgaagtagaaatattttcttaaatattttctctaagtatgcaaagcacctttaggagagtgtgtggctataatttaacagtgacagtgtgtgctttgcacactgacc
aggattaagttcatttttattaactgggttgcttgctattaaataaaccttaaattaaaccacttttgttatcaatgaaataaaccatcatcttaaaatatgattatttaccttaaaa
aaaataattttattttgtattcatgctaaggcagtctgtatggcatttggggaggaaaagattctttctggattaaaaggagccataagataatggaaaaggtcttcaaacg
tgtaattaagattaaattaatcatctttttttctcaataagcatattattttgctgagtcactaagtatatttaaatgatattgcattggattaagaggattaatgcttaacctcactt
ctttgtttgcttaggactgcc
Nucleotide sequence of 600 bp promoter region where sgRNAs have been designed for OPRK1 (SEQ ID NO:
40)
aaggagagtgttttgcccttctcagatactatcagcaattcaggtaatacccgtaaggtgcagtttgtctgcagcctgtcatcccagttagagcagacggaatggaaga
gaacgcaaggaaatattctatttatgtgtcttttaagtcattattttatgaactggtcttattctaactggatcattttgttactttctttggatgggccattctaataagcgtagttcct
gactgcgaactatgcagataagaagttctagacacaatatgaaaatccaggtgcatacttgcactaaataggcatgctcctcctttttactaaatctaaatggctcagtct
caggtcttggggaaggctgcatggccggggaccaggcggtgtgccgctcgggcagttagtgggccgggcgagcctgcggggctggaggggacgcggggctgg
gaggctggggagctgggggctgactccggggggcggggggggcagggacctgccggcctggggggggcaccagacgagctctccgcccgcaggccc
ccagcgcccagccgcgtcccggctgcgtcccgccggtcccgccccgccccgccccgc
Nucleotide sequence of 600 bp promoter region where sgRNAs have been designed for OPRM1 (SEQ ID NO:
41)
ttactggatgccacaaccttctgatttctgtaaccacttcttatgcctcctacccactgaaacaaaatcagaggcaaacagagcttcaccctagaaattggggaaaatg
aggaacaggttttctgcacaaaagtttatttgtttctcatttctttttcagaaaataaaggatcgctgttgttcccaacaggtttgtagggaagaaaattggagaaacattatt
accttttcttagatgttggcaacggaggcaacaaggactgcaaaagaaaattgtgtgtcccccattcctaaataatcaaaattggcagtagggatggaagagcattgg
ggttttagggctgttagggtttcatcaagccaatgtattccctgccagattttaaggagaaaaaggcgctggaaaattgagtgatgttagccccctttcttatttttcactgcta
ccaaagactaactctatctctctccccaacccttctctccatctccctcctttagatgtgtttgcacagaagagtgcccagtgaagagacctactccttggatcgctttgcgc
aaaatccaccccttttccctcctccctcccttccagcctcc
Nucleotide sequence of 600 bp promoter region where sgRNAs have been designed for OPRD1 (SEQ ID NO:
42)
tctctcctgcactgggctgtaagccccaggaagcagaggctgcatctggttttgtgtactagagggtccccccaaatacccggctcttctattaggcaccctcagaattttt
gttgagcgaatgaatggggtgcaagaaaggcacggataatataggttatttacggagcatgtaactgtccgcagggcactgctctaagctctttgttcgaatcattttatt
caatctccccaaccaccctctgagggaggtggtacgattttcctcatctcacagacaaagagaatgaagctgagggaggttaagtgacttacacaaggtcactccgc
ctgttagtgcaggggcgggaggcgggatccacacccaggtccctctgacaccaaagtggcaaggggggggaggggagtccaggttgggacggggtcgcactc
gagccggcggagcatccctagggaggggggggaggcctcccctgcccagctccgagccggtggtgcagcgtccgcccccggtcgcgggcgcagactggcgg
ccgcctccgggccacgtggtgcgcgcggcgggcgcgtccgaggagcctgcggctgctcctggctc
Nucleotide sequence of 600 bp promoter region where sgRNAs have been designed for OPRL1 (SEQ ID NO:
43)
ccagatccagcggggtggggggggggggacagggtgtcccgccccggcccctcctcaccgggctgagagggggagggagacgcggaaacctgggttcttc
cggcccccacctttgagcaatcacttccccaggctttgagctccagaaaaaggggaacccggctgcggcgccccctcccccacgcgcgggggggggctccactt
ccactgcggcccagggtccacgtggacctggcgggggagcccttggggttcgagtcccgtgcgccggctcccgaagctcccgcccagcacggtccccgggccc
gggccgggaggggcagggccgctgtccccggcgctgcgcgcgcgcactcaccagccgcgctcccgagccactcgcgccgccgccggcccgcgcgctccaag
gtccggcccgacagtcggggagggggcgcgggggcgcagtgcgcaggcgcctcggcggcacttccccaaagccaggggccgggacttcctcgcgccggcggt
cgccgggcccgccccgcccgccgcgccccgccccgcgctcggccggctccgcaccccacccgccccgcccgcgcgtcggcccccac
Nucleotide sequence of 600 bp promoter region where sgRNAs have been designed for KCNJ2 (SEQ ID NO:
44)
gggctctgcgcgcccgccccagtccctcgccccattgactcagtggcttctccgggcgctgcagcctccgcggggggcttcgaagggccgaggggctccggcaga
gagggagtggagagggagacgcgccgggaccgacgaacaatcctgcccctgcggcaaaggtctctacccggcgctggcacctcgcaggcccctcgaggagc
acgcagggcaagcggcccaagagcgggggaaccgggaagtgtgtggggctccagacggagtaggaagctttgcccaaggccaggctgcaatcaggcagccg
caacagccgggcgcggagcttcccacctgctgctgtcccagctgggccgcaacttcctcctccccggcccgggcccgactccccggccgggctccgagggtggag
ggggacgaggcggcggcaggttccctccgctggcaacgcctcgcagcatcctcccctccccgccgcggttcccggggccggccgcgcggccaggcgcgctgcg
attggccggcagcggccgggggcggggccaggagagccggtgtcgcacggaccgcctcaaaagagcccaggatattgcagagcgc
Nucleotide sequence of 600 bp promoter region where sgRNAs have been designed for GABRA1 (SEQ ID NO:
45)
ggggggtggaaagcgctcccaacctgagaaagtgcgaaagactctctaaatccagtagccaatttcctacctgccagaactctttcctaccatccgtcaccattcgtg
actctgcaagacacggggacttagacatatgtgtgggagtgtgtgtgtgagggagagaggcgagacgagtgctctccccacacgtgtaaccctgcatctcccagtttc
agagcttgcgttcattcatatgcaggcagtggtttaatatttgatcaaaggtagaatagttgcactaaatagttgtattittaatgggctcaccttaaaatcgggtgttcataa
attgcaagtgtgaaaagactctaagtgcagtccgtatgtctctcaccctttctacccttccctcccccattgccgctccccccaaaaagagaagcttgcagcagattgtag
aaggatttgagcctgcagctagagagaaggggattagggccagagtggtgcaagttaaattgtgctgcatataaaaaatgggcggattggtctccagatccagagg
ctggtaccaccttcctttctaaaataaaatctctctggcatgaagtcaccgc
Nucleotide sequence of 600 bp promoter region where sgRNAs have been designed for GABRA2 (SEQ ID NO:
46)
gaacctctttacctcttagcagccacgtcgctccacagtagggtgatgttgggggacgggcggcagggcgcggccccagggatctagggcatcaccgccacacta
cattcccggctttacaccaacacccaacagcagctctgtcaggaaccttggggcctctcgggagccccagcaagcggcctcggggagcagcccgaggctgcgcg
tgggctccgctcctccggcgaggtgtgggcgaggggagcggcgctccgagcgcacccaggcgcccgacgccgcccgggtctgcgccgctgctagtgccaggcg
ggcgacggtcagttaccagggatcgagggatcgaggcaggggagtgtgtgtgtgtgggggggggggaggggggggagggggggccctgccttcccgggaacc
tccttagccctcctacccggcctgactcctcctcctccaggcgcggggctcgtgcccgccaccgccggcgcgcaccgcgcctccgcccgcgtccccccaatttcccc
ccccggccccagctcctgtcatcgttttccccctcctcctcttcctcctcctcctcttcctcctcctccgcccatcacc
COMBINATORIAL CRISPR CLONING SEQUENCES
All these sequences are for the S. Aureus (sa) dCAS9
1. sgRNA sequences for in vitro screening using qPCR
1.1 LacZ
Nucleotide sequence of sasgRNA for mouse genes; sgRNA LacZ control (SEQ ID NO: 47)
gTGCGAATACGCCCACGCGAT
pAAV-CMV-sadCas9-U6gRNA(Lacz-sa_sgRNA) used as control in in vitro qPCR experiments (SEQ ID NO:
48)
CCTGCAGGCAGCTGCGCGCTCGCTCGCTCACTGAGGCCGCCCGGGCGTCGGGCGACCTTTGGTCGCCCGGCC
TCAGTGAGCGAGCGAGCGCGCAGAGAGGGAGTGGCCAACTCCATCACTAGGGGTTCCTGCGGCCTCTAGACTC
GAGGCGTTGACATTGATTATTGACTAGTTATTAATAGTAATCAATTACGGGGTCATTAGTTCATAGCCCATATATG
GAGTTCCGCGTTACATAACTTACGGTAAATGGCCCGCCTGGCTGACCGCCCAACGACCCCCGCCCATTGACGT
CAATAATGACGTATGTTCCCATAGTAACGCCAATAGGGACTTTCCATTGACGTCAATGGGTGGAGTATTTACGGT
AAACTGCCCACTTGGCAGTACATCAAGTGTATCATATGCCAAGTACGCCCCCTATTGACGTCAATGACGGTAAAT
GGCCCGCCTGGCATTATGCCCAGTACATGACCTTATGGGACTTTCCTACTTGGCAGTACATCTACGTATTAGTCA
TCGCTATTACCATGGTGATGCGGTTTTGGCAGTACATCAATGGGCGTGGATAGCGGTTTGACTCACGGGGATTT
CCAAGTCTCCACCCCATTGACGTCAATGGGAGTTTGTTTTGGCACCAAAATCAACGGGACTTTCCAAAATGTCGT
AACAACTCCGCCCCATTGACGCAAATGGGCGGTAGGCGTGTACGGTGGGAGGTCTATATAAGCAGAGCTCTCT
GGCTAACTACCGGTGCCACCATGGCCCCAAAGAAGAAGCGGAAGGTCGGTATCCACGGAGTCCCAGCAGCCAA
GCGGAACTACATCCTGGGCCTGGCCATCGGCATCACCAGCGTGGGCTACGGCATCATCGACTACGAGACACGG
GACGTGATCGATGCCGGCGTGCGGCTGTTCAAAGAGGCCAACGTGGAAAACAACGAGGGCAGGCGGAGCAAG
AGAGGCGCCAGAAGGCTGAAGCGGCGGAGGCGGCATAGAATCCAGAGAGTGAAGAAGCTGCTGTTCGACTAC
AACCTGCTGACCGACCACAGCGAGCTGAGCGGCATCAACCCCTACGAGGCCAGAGTGAAGGGCCTGAGCCAG
AAGCTGAGCGAGGAAGAGTTCTCTGCCGCCCTGCTGCACCTGGCCAAGAGAAGAGGCGTGCACAACGTGAACG
AGGTGGAAGAGGACACCGGCAACGAGCTGTCCACCAAAGAGCAGATCAGCCGGAACAGCAAGGCCCTGGAAG
AGAAATACGTGGCCGAACTGCAGCTGGAACGGCTGAAGAAAGACGGCGAAGTGCGGGGCAGCATCAACAGATT
CAAGACCAGCGACTACGTGAAAGAAGCCAAACAGCTGCTGAAGGTGCAGAAGGCCTACCACCAGCTGGACCAG
AGCTTCATCGACACCTACATCGACCTGCTGGAAACCCGGCGGACCTACTATGAGGGACCTGGCGAGGGCAGCC
CCTTCGGCTGGAAGGACATCAAAGAATGGTACGAGATGCTGATGGGCCACTGCACCTACTTCCCCGAGGAACT
GCGGAGCGTGAAGTACGCCTACAACGCCGACCTGTACAACGCCCTGAACGACCTGAACAATCTCGTGATCACC
AGGGACGAGAACGAGAAGCTGGAATATTACGAGAAGTTCCAGATCATCGAGAACGTGTTCAAGCAGAAGAAGAA
GCCCACCCTGAAGCAGATCGCCAAAGAAATCCTCGTGAACGAAGAGGATATTAAGGGCTACAGAGTGACCAGCA
CCGGCAAGCCCGAGTTCACCAACCTGAAGGTGTACCACGACATCAAGGACATTACCGCCCGGAAAGAGATTATT
GAGAACGCCGAGCTGCTGGATCAGATTGCCAAGATCCTGACCATCTACCAGAGCAGCGAGGACATCCAGGAAG
AACTGACCAATCTGAACTCCGAGCTGACCCAGGAAGAGATCGAGCAGATCTCTAATCTGAAGGGCTATACCGGC
ACCCACAACCTGAGCCTGAAGGCCATCAACCTGATCCTGGACGAGCTGTGGCACACCAACGACAACCAGATCG
CTATCTTCAACCGGCTGAAGCTGGTGCCCAAGAAGGTGGACCTGTCCCAGCAGAAAGAGATCCCCACCACCCT
GGTGGACGACTTCATCCTGAGCCCCGTCGTGAAGAGAAGCTTCATCCAGAGCATCAAAGTGATCAACGCCATCA
TCAAGAAGTACGGCCTGCCCAACGACATCATTATCGAGCTGGCCCGCGAGAAGAACTCCAAGGACGCCCAGAA
AATGATCAACGAGATGCAGAAGCGGAACCGGCAGACCAACGAGCGGATCGAGGAAATCATCCGGACCACCGGC
AAAGAGAACGCCAAGTACCTGATCGAGAAGATCAAGCTGCACGACATGCAGGAAGGCAAGTGCCTGTACAGCC
TGGAAGCCATCCCTCTGGAAGATCTGCTGAACAACCCCTTCAACTATGAGGTGGACCACATCATCCCCAGAAGC
GTGTCCTTCGACAACAGCTTCAACAACAAGGTGCTCGTGAAGCAGGAAGAAGCCAGCAAGAAGGGCAACCGGA
CCCCATTCCAGTACCTGAGCAGCAGCGACAGCAAGATCAGCTACGAAACCTTCAAGAAGCACATCCTGAATCTG
GCCAAGGGCAAGGGCAGAATCAGCAAGACCAAGAAAGAGTATCTGCTGGAAGAACGGGACATCAACAGGTTCT
CCGTGCAGAAAGACTTCATCAACCGGAACCTGGTGGATACCAGATACGCCACCAGAGGCCTGATGAACCTGCT
GCGGAGCTACTTCAGAGTGAACAACCTGGACGTGAAAGTGAAGTCCATCAATGGCGGCTTCACCAGCTTTCTGC
GGCGGAAGTGGAAGTTTAAGAAAGAGCGGAACAAGGGGTACAAGCACCACGCCGAGGACGCCCTGATCATTGC
CAACGCCGATTTCATCTTCAAAGAGTGGAAGAAACTGGACAAGGCCAAAAAAGTGATGGAAAACCAGATGTTCG
AGGAAAAGCAGGCCGAGAGCATGCCCGAGATCGAAACCGAGCAGGAGTACAAAGAGATCTTCATCACCCCCCA
CCAGATCAAGCACATTAAGGACTTCAAGGACTACAAGTACAGCCACCGGGTGGACAAGAAGCCTAATAGAGAGC
TGATTAACGACACCCTGTACTCCACCCGGAAGGACGACAAGGGCAACACCCTGATCGTGAACAATCTGAACGGC
CTGTACGACAAGGACAATGACAAGCTGAAAAAGCTGATCAACAAGAGCCCCGAAAAGCTGCTGATGTACCACCA
CGACCCCCAGACCTACCAGAAACTGAAGCTGATTATGGAACAGTACGGCGACGAGAAGAATCCCCTGTACAAGT
ACTACGAGGAAACCGGGAACTACCTGACCAAGTACTCCAAAAAGGACAACGGCCCCGTGATCAAGAAGATTAAG
TATTACGGCAACAAACTGAACGCCCATCTGGACATCACCGACGACTACCCCAACAGCAGAAACAAGGTCGTGAA
GCTGTCCCTGAAGCCCTACAGATTCGACGTGTACCTGGACAATGGCGTGTACAAGTTCGTGACCGTGAAGAATC
TGGATGTGATCAAAAAAGAAAACTACTACGAAGTGAATAGCAAGTGCTATGAGGAAGCTAAGAAGCTGAAGAAGA
TCAGCAACCAGGCCGAGTTTATCGCCTCCTTCTACAACAACGATCTGATCAAGATCAACGGCGAGCTGTATAGA
GTGATCGGCGTGAACAACGACCTGCTGAACCGGATCGAAGTGAACATGATCGACATCACCTACCGCGAGTACCT
GGAAAACATGAACGACAAGAGGCCCCCCAGGATCATTAAGACAATCGCCTCCAAGACCCAGAGCATTAAGAAGT
ACAGCACAGACATTCTGGGCAACCTGTATGAAGTGAAATCTAAGAAGCACCCTCAGATCATCAAAAAGGGCAAAA
GGCCGGCGGCCACGAAAAAGGCCGGCCAGGCAAAAAAGAAAAAGGGATCCGGACGGGCTGACGCATTGGACG
ATTTTGATCTGGATATGCTGGGAAGTGACGCCCTCGATGATTTTGACCTTGACATGCTTGGTTCGGATGCCCTTG
ATGACTTTGACCTCGACATGCTCGGCAGTGACGCCCTTGATGATTTCGACCTGGACATGCTGATTAACTGTACAG
GCAGTGGAGAGGGCAGAGGAAGTCTGCTAACATGCGGTGACGTCGAGGAGAATCCTGGCCCAATGGCCAAGC
CTTTGTCTCAAGAAGAATCCACCCTCATTGAAAGAGCAACGGCTACAATCAACAGCATCCCCATCTCTGAAGACT
ACAGCGTCGCCAGCGCAGCTCTCTCTAGCGACGGCCGCATCTTCACTGGTGTCAATGTATATCATTTTACTGGG
GGACCTTGTGCAGAACTCGTGGTGCTGGGCACTGCTGCTGCTGCGGCAGCTGGCAACCTGACTTGTATCGTCG
CGATCGGAAATGAGAACAGGGGCATCTTGAGCCCCTGCGGACGGTGCCGACAGGTGCTTCTCGATCTGCATCC
TGGGATCAAAGCCATAGTGAAGGACAGTGATGGACAGCCGACGGCAGTTGGGATTCGTGAATTGCTGCCCTCT
GGTTATGTGTGGGAGGGCTAAGAATTCCTAGAGCTCGCTGATCAGCCTCGACTGTGCCTTCTAGTTGCCAGCCA
TCTGTTGTTTGCCCCTCCCCCGTGCCTTCCTTGACCCTGGAAGGTGCCACTCCCACTGTCCTTTCCTAATAAAAT
GAGGAAATTGCATCGCATTGTCTGAGTAGGTGTCATTCTATTCTGGGGGGTGGGGTGGGGCAGGACAGCAAGG
GGGAGGATTGGGAAGAGAATAGCAGGCATGCTGGGGAGGTACCGAGGGCCTATTTCCCATGATTCCTTCATATT
TGCATATACGATACAAGGCTGTTAGAGAGATAATTGGAATTAATTTGACTGTAAACACAAAGATATTAGTACAAAA
TACGTGACGTAGAAAGTAATAATTTCTTGGGTAGTTTGCAGTTTTAAAATTATGTTTTAAAATGGACTATCATATGC
TTACCGTAACTTGAAAGTATTTCGATTTCTTGGCTTTATATATCTTGTGGAAAGGACGAAAcaccgTGCGAATACGC
CCACGCGATgtTTTTAGTACTCTGGAAACAGAATCTACTAAAACAAGGCAAAATGCCGTGTTTATCTCGTCAACTT
GTTGGCGAGATTTTTGCGGCCGCAGGAACCCCTAGTGATGGAGTTGGCCACTCCCTCTCTGCGCGCTCGCTCG
CTCACTGAGGCCGGGCGACCAAAGGTCGCCCGACGCCCGGGCTTTGCCCGGGCGGCCTCAGTGAGCGAGCG
AGCGCGCAGCTGCCTGCAGGGGCGCCTGATGCGGTATTTTCTCCTTACGCATCTGTGCGGTATTTCACACCGCA
TACGTCAAAGCAACCATAGTACGCGCCCTGTAGCGGCGCATTAAGCGCGGCGGGTGTGGTGGTTACGCGCAGC
GTGACCGCTACACTTGCCAGCGCCTTAGCGCCCGCTCCTTTCGCTTTCTTCCCTTCCTTTCTCGCCACGTTCGC
CGGCTTTCCCCGTCAAGCTCTAAATCGGGGGCTCCCTTTAGGGTTCCGATTTAGTGCTTTACGGCACCTCGACC
CCAAAAAACTTGATTTGGGTGATGGTTCACGTAGTGGGCCATCGCCCTGATAGACGGTTTTTCGCCCTTTGACGT
TGGAGTCCACGTTCTTTAATAGTGGACTCTTGTTCCAAACTGGAACAACACTCAACTCTATCTCGGGCTATTCTTT
TGATTTATAAGGGATTTTGCCGATTTCGGTCTATTGGTTAAAAAATGAGCTGATTTAACAAAAATTTAACGCGAATT
TTAACAAAATATTAACGTTTACAATTTTATGGTGCACTCTCAGTACAATCTGCTCTGATGCCGCATAGTTAAGCCA
GCCCCGACACCCGCCAACACCCGCTGACGCGCCCTGACGGGCTTGTCTGCTCCCGGCATCCGCTTACAGACAA
GCTGTGACCGTCTCCGGGAGCTGCATGTGTCAGAGGTTTTCACCGTCATCACCGAAACGCGCGAGACGAAAGG
GCCTCGTGATACGCCTATTTTTATAGGTTAATGTCATGATAATAATGGTTTCTTAGACGTCAGGTGGCACTTTTCG
GGGAAATGTGCGCGGAACCCCTATTTGTTTATTTTTCTAAATACATTCAAATATGTATCCGCTCATGAGACAATAA
CCCTGATAAATGCTTCAATAATATTGAAAAAGGAAGAGTATGAGTATTCAACATTTCCGTGTCGCCCTTATTCCCT
TTTTTGCGGCATTTTGCCTTCCTGTTTTTGCTCACCCAGAAACGCTGGTGAAAGTAAAAGATGCTGAAGATCAGTT
GGGTGCACGAGTGGGTTACATCGAACTGGATCTCAACAGCGGTAAGATCCTTGAGAGTTTTCGCCCCGAAGAAC
GTTTTCCAATGATGAGCACTTTTAAAGTTCTGCTATGTGGCGCGGTATTATCCCGTATTGACGCCGGGCAAGAGC
AACTCGGTCGCCGCATACACTATTCTCAGAATGACTTGGTTGAGTACTCACCAGTCACAGAAAAGCATCTTACGG
ATGGCATGACAGTAAGAGAATTATGCAGTGCTGCCATAACCATGAGTGATAACACTGCGGCCAACTTACTTCTGA
CAACGATCGGAGGACCGAAGGAGCTAACCGCTTTTTTGCACAACATGGGGGATCATGTAACTCGCCTTGATCGT
TGGGAACCGGAGCTGAATGAAGCCATACCAAACGACGAGCGTGACACCACGATGCCTGTAGCAATGGCAACAA
CGTTGCGCAAACTATTAACTGGCGAACTACTTACTCTAGCTTCCCGGCAACAATTAATAGACTGGATGGAGGCG
GATAAAGTTGCAGGACCACTTCTGCGCTCGGCCCTTCCGGCTGGCTGGTTTATTGCTGATAAATCTGGAGCCGG
TGAGCGTGGAAGCCGCGGTATCATTGCAGCACTGGGGCCAGATGGTAAGCCCTCCCGTATCGTAGTTATCTACA
CGACGGGGAGTCAGGCAACTATGGATGAACGAAATAGACAGATCGCTGAGATAGGTGCCTCACTGATTAAGCAT
TGGTAACTGTCAGACCAAGTTTACTCATATATACTTTAGATTGATTTAAAACTTCATTTTTAATTTAAAAGGATCTAG
GTGAAGATCCTTTTTGATAATCTCATGACCAAAATCCCTTAACGTGAGTTTTCGTTCCACTGAGCGTCAGACCCC
GTAGAAAAGATCAAAGGATCTTCTTGAGATCCTTTTTTTCTGCGCGTAATCTGCTGCTTGCAAACAAAAAAACCAC
CGCTACCAGCGGTGGTTTGTTTGCCGGATCAAGAGCTACCAACTCTTTTTCCGAAGGTAACTGGCTTCAGCAGA
GCGCAGATACCAAATACTGTTCTTCTAGTGTAGCCGTAGTTAGGCCACCACTTCAAGAACTCTGTAGCACCGCCT
ACATACCTCGCTCTGCTAATCCTGTTACCAGTGGCTGCTGCCAGTGGCGATAAGTCGTGTCTTACCGGGTTGGA
CTCAAGACGATAGTTACCGGATAAGGCGCAGCGGTCGGGCTGAACGGGGGGTTCGTGCACACAGCCCAGCTTG
GAGCGAACGACCTACACCGAACTGAGATACCTACAGCGTGAGCTATGAGAAAGCGCCACGCTTCCCGAAGGGA
GAAAGGCGGACAGGTATCCGGTAAGCGGCAGGGTCGGAACAGGAGAGCGCACGAGGGAGCTTCCAGGGGGA
AACGCCTGGTATCTTTATAGTCCTGTCGGGTTTCGCCACCTCTGACTTGAGCGTCGATTTTTGTGATGCTCGTCA
GGGGGGCGGAGCCTATGGAAAAACGCCAGCAACGCGGCCTTTTTACGGTTCCTGGCCTTTTGCTGGCCTTTTG
CTCACATGT
1.2 KCNA1
Nucleotide sequence of sasgRNA for mouse KCNA1; sgRNA1 (SEQ ID NO: 49)
TACTAGCCACAATAGAGCCAG
Nucleotide sequence of sasgRNA for mouse KCNA1; sgRNA2 (SEQ ID NO: 50)
CCTTACTAGCCACAATAGAGC
Nucleotide sequence of sasgRNA for mouse KCNA1; sgRNA3 (SEQ ID NO: 51)
TGTGATCATTGACTTTGATTA
Nucleotide sequence of sasgRNA for mouse KCNA1; sgRNA4 (SEQ ID NO: 52)
AGGGGCCTCTAGAAGGATCCC
Nucleotide sequence of sasgRNA for mouse KCNA1; sgRNA5 (SEQ ID NO: 53)
TTGATTAAAGAGGTTGGTGGT
Nucleotide sequence of sasgRNA for mouse KCNA1; sgRNA6 (SEQ ID NO: 54)
GAATTTAACTAGCTGTATCCC
Nucleotide sequence of sasgRNA for mouse KCNA1; sgRNA7 (SEQ ID NO: 55)
TACTAGCCACAATAGAGCCAG
pAAV-CMV-sadCas9-U6gRNA(Kcna1-sa_sgRNA1) used in in vitro qPCR experiments (SEQ ID NO: 56)
CCTGCAGGCAGCTGCGCGCTCGCTCGCTCACTGAGGCCGCCCGGGCGTCGGGCGACCTTTGGTCGCCCGGCC
TCAGTGAGCGAGCGAGCGCGCAGAGAGGGAGTGGCCAACTCCATCACTAGGGGTTCCTGCGGCCTCTAGACTC
GAGGCGTTGACATTGATTATTGACTAGTTATTAATAGTAATCAATTACGGGGTCATTAGTTCATAGCCCATATATG
GAGTTCCGCGTTACATAACTTACGGTAAATGGCCCGCCTGGCTGACCGCCCAACGACCCCCGCCCATTGACGT
CAATAATGACGTATGTTCCCATAGTAACGCCAATAGGGACTTTCCATTGACGTCAATGGGTGGAGTATTTACGGT
AAACTGCCCACTTGGCAGTACATCAAGTGTATCATATGCCAAGTACGCCCCCTATTGACGTCAATGACGGTAAAT
GGCCCGCCTGGCATTATGCCCAGTACATGACCTTATGGGACTTTCCTACTTGGCAGTACATCTACGTATTAGTCA
TCGCTATTACCATGGTGATGCGGTTTTGGCAGTACATCAATGGGCGTGGATAGCGGTTTGACTCACGGGGATTT
CCAAGTCTCCACCCCATTGACGTCAATGGGAGTTTGTTTTGGCACCAAAATCAACGGGACTTTCCAAAATGTCGT
AACAACTCCGCCCCATTGACGCAAATGGGCGGTAGGCGTGTACGGTGGGAGGTCTATATAAGCAGAGCTCTCT
GGCTAACTACCGGTGCCACCATGGCCCCAAAGAAGAAGCGGAAGGTCGGTATCCACGGAGTCCCAGCAGCCAA
GCGGAACTACATCCTGGGCCTGGCCATCGGCATCACCAGCGTGGGCTACGGCATCATCGACTACGAGACACGG
GACGTGATCGATGCCGGCGTGCGGCTGTTCAAAGAGGCCAACGTGGAAAACAACGAGGGCAGGCGGAGCAAG
AGAGGCGCCAGAAGGCTGAAGCGGCGGAGGCGGCATAGAATCCAGAGAGTGAAGAAGCTGCTGTTCGACTAC
AACCTGCTGACCGACCACAGCGAGCTGAGCGGCATCAACCCCTACGAGGCCAGAGTGAAGGGCCTGAGCCAG
AAGCTGAGCGAGGAAGAGTTCTCTGCCGCCCTGCTGCACCTGGCCAAGAGAAGAGGCGTGCACAACGTGAACG
AGGTGGAAGAGGACACCGGCAACGAGCTGTCCACCAAAGAGCAGATCAGCCGGAACAGCAAGGCCCTGGAAG
AGAAATACGTGGCCGAACTGCAGCTGGAACGGCTGAAGAAAGACGGCGAAGTGCGGGGCAGCATCAACAGATT
CAAGACCAGCGACTACGTGAAAGAAGCCAAACAGCTGCTGAAGGTGCAGAAGGCCTACCACCAGCTGGACCAG
AGCTTCATCGACACCTACATCGACCTGCTGGAAACCCGGCGGACCTACTATGAGGGACCTGGCGAGGGCAGCC
CCTTCGGCTGGAAGGACATCAAAGAATGGTACGAGATGCTGATGGGCCACTGCACCTACTTCCCCGAGGAACT
GCGGAGCGTGAAGTACGCCTACAACGCCGACCTGTACAACGCCCTGAACGACCTGAACAATCTCGTGATCACC
AGGGACGAGAACGAGAAGCTGGAATATTACGAGAAGTTCCAGATCATCGAGAACGTGTTCAAGCAGAAGAAGAA
GCCCACCCTGAAGCAGATCGCCAAAGAAATCCTCGTGAACGAAGAGGATATTAAGGGCTACAGAGTGACCAGCA
CCGGCAAGCCCGAGTTCACCAACCTGAAGGTGTACCACGACATCAAGGACATTACCGCCCGGAAAGAGATTATT
GAGAACGCCGAGCTGCTGGATCAGATTGCCAAGATCCTGACCATCTACCAGAGCAGCGAGGACATCCAGGAAG
AACTGACCAATCTGAACTCCGAGCTGACCCAGGAAGAGATCGAGCAGATCTCTAATCTGAAGGGCTATACCGGC
ACCCACAACCTGAGCCTGAAGGCCATCAACCTGATCCTGGACGAGCTGTGGCACACCAACGACAACCAGATCG
CTATCTTCAACCGGCTGAAGCTGGTGCCCAAGAAGGTGGACCTGTCCCAGCAGAAAGAGATCCCCACCACCCT
GGTGGACGACTTCATCCTGAGCCCCGTCGTGAAGAGAAGCTTCATCCAGAGCATCAAAGTGATCAACGCCATCA
TCAAGAAGTACGGCCTGCCCAACGACATCATTATCGAGCTGGCCCGCGAGAAGAACTCCAAGGACGCCCAGAA
AATGATCAACGAGATGCAGAAGCGGAACCGGCAGACCAACGAGCGGATCGAGGAAATCATCCGGACCACCGGC
AAAGAGAACGCCAAGTACCTGATCGAGAAGATCAAGCTGCACGACATGCAGGAAGGCAAGTGCCTGTACAGCC
TGGAAGCCATCCCTCTGGAAGATCTGCTGAACAACCCCTTCAACTATGAGGTGGACCACATCATCCCCAGAAGC
GTGTCCTTCGACAACAGCTTCAACAACAAGGTGCTCGTGAAGCAGGAAGAAGCCAGCAAGAAGGGCAACCGGA
CCCCATTCCAGTACCTGAGCAGCAGCGACAGCAAGATCAGCTACGAAACCTTCAAGAAGCACATCCTGAATCTG
GCCAAGGGCAAGGGCAGAATCAGCAAGACCAAGAAAGAGTATCTGCTGGAAGAACGGGACATCAACAGGTTCT
CCGTGCAGAAAGACTTCATCAACCGGAACCTGGTGGATACCAGATACGCCACCAGAGGCCTGATGAACCTGCT
GCGGAGCTACTTCAGAGTGAACAACCTGGACGTGAAAGTGAAGTCCATCAATGGCGGCTTCACCAGCTTTCTGC
GGCGGAAGTGGAAGTTTAAGAAAGAGCGGAACAAGGGGTACAAGCACCACGCCGAGGACGCCCTGATCATTGC
CAACGCCGATTTCATCTTCAAAGAGTGGAAGAAACTGGACAAGGCCAAAAAAGTGATGGAAAACCAGATGTTCG
AGGAAAAGCAGGCCGAGAGCATGCCCGAGATCGAAACCGAGCAGGAGTACAAAGAGATCTTCATCACCCCCCA
CCAGATCAAGCACATTAAGGACTTCAAGGACTACAAGTACAGCCACCGGGTGGACAAGAAGCCTAATAGAGAGC
TGATTAACGACACCCTGTACTCCACCCGGAAGGACGACAAGGGCAACACCCTGATCGTGAACAATCTGAACGGC
CTGTACGACAAGGACAATGACAAGCTGAAAAAGCTGATCAACAAGAGCCCCGAAAAGCTGCTGATGTACCACCA
CGACCCCCAGACCTACCAGAAACTGAAGCTGATTATGGAACAGTACGGCGACGAGAAGAATCCCCTGTACAAGT
ACTACGAGGAAACCGGGAACTACCTGACCAAGTACTCCAAAAAGGACAACGGCCCCGTGATCAAGAAGATTAAG
TATTACGGCAACAAACTGAACGCCCATCTGGACATCACCGACGACTACCCCAACAGCAGAAACAAGGTCGTGAA
GCTGTCCCTGAAGCCCTACAGATTCGACGTGTACCTGGACAATGGCGTGTACAAGTTCGTGACCGTGAAGAATC
TGGATGTGATCAAAAAAGAAAACTACTACGAAGTGAATAGCAAGTGCTATGAGGAAGCTAAGAAGCTGAAGAAGA
TCAGCAACCAGGCCGAGTTTATCGCCTCCTTCTACAACAACGATCTGATCAAGATCAACGGCGAGCTGTATAGA
GTGATCGGCGTGAACAACGACCTGCTGAACCGGATCGAAGTGAACATGATCGACATCACCTACCGCGAGTACCT
GGAAAACATGAACGACAAGAGGCCCCCCAGGATCATTAAGACAATCGCCTCCAAGACCCAGAGCATTAAGAAGT
ACAGCACAGACATTCTGGGCAACCTGTATGAAGTGAAATCTAAGAAGCACCCTCAGATCATCAAAAAGGGCAAAA
GGCCGGCGGCCACGAAAAAGGCCGGCCAGGCAAAAAAGAAAAAGGGATCCGGACGGGCTGACGCATTGGACG
ATTTTGATCTGGATATGCTGGGAAGTGACGCCCTCGATGATTTTGACCTTGACATGCTTGGTTCGGATGCCCTTG
ATGACTTTGACCTCGACATGCTCGGCAGTGACGCCCTTGATGATTTCGACCTGGACATGCTGATTAACTGTACAG
GCAGTGGAGAGGGCAGAGGAAGTCTGCTAACATGCGGTGACGTCGAGGAGAATCCTGGCCCAATGGCCAAGC
CTTTGTCTCAAGAAGAATCCACCCTCATTGAAAGAGCAACGGCTACAATCAACAGCATCCCCATCTCTGAAGACT
ACAGCGTCGCCAGCGCAGCTCTCTCTAGCGACGGCCGCATCTTCACTGGTGTCAATGTATATCATTTTACTGGG
GGACCTTGTGCAGAACTCGTGGTGCTGGGCACTGCTGCTGCTGCGGCAGCTGGCAACCTGACTTGTATCGTCG
CGATCGGAAATGAGAACAGGGGCATCTTGAGCCCCTGCGGACGGTGCCGACAGGTGCTTCTCGATCTGCATCC
TGGGATCAAAGCCATAGTGAAGGACAGTGATGGACAGCCGACGGCAGTTGGGATTCGTGAATTGCTGCCCTCT
GGTTATGTGTGGGAGGGCTAAGAATTCCTAGAGCTCGCTGATCAGCCTCGACTGTGCCTTCTAGTTGCCAGCCA
TCTGTTGTTTGCCCCTCCCCCGTGCCTTCCTTGACCCTGGAAGGTGCCACTCCCACTGTCCTTTCCTAATAAAAT
GAGGAAATTGCATCGCATTGTCTGAGTAGGTGTCATTCTATTCTGGGGGGTGGGGTGGGGCAGGACAGCAAGG
GGGAGGATTGGGAAGAGAATAGCAGGCATGCTGGGGAGGTACCGAGGGCCTATTTCCCATGATTCCTTCATATT
TGCATATACGATACAAGGCTGTTAGAGAGATAATTGGAATTAATTTGACTGTAAACACAAAGATATTAGTACAAAA
TACGTGACGTAGAAAGTAATAATTTCTTGGGTAGTTTGCAGTTTTAAAATTATGTTTTAAAATGGACTATCATATGC
TTACCGTAACTTGAAAGTATTTCGATTTCTTGGCTTTATATATCTTGTGGAAAGGACGAAACACCGTACTAGCCAC
AATAGAGCCAGGTTTTAGTACTCTGGAAACAGAATCTACTAAAACAAGGCAAAATGCCGTGTTTATCTCGTCAACT
TGTTGGCGAGATTTTTGCGGCCGCAGGAACCCCTAGTGATGGAGTTGGCCACTCCCTCTCTGCGCGCTCGCTC
GCTCACTGAGGCCGGGCGACCAAAGGTCGCCCGACGCCCGGGCTTTGCCCGGGCGGCCTCAGTGAGCGAGC
GAGCGCGCAGCTGCCTGCAGGGGCGCCTGATGCGGTATTTTCTCCTTACGCATCTGTGCGGTATTTCACACCG
CATACGTCAAAGCAACCATAGTACGCGCCCTGTAGCGGCGCATTAAGCGCGGCGGGTGTGGTGGTTACGCGCA
GCGTGACCGCTACACTTGCCAGCGCCTTAGCGCCCGCTCCTTTCGCTTTCTTCCCTTCCTTTCTCGCCACGTTC
GCCGGCTTTCCCCGTCAAGCTCTAAATCGGGGGCTCCCTTTAGGGTTCCGATTTAGTGCTTTACGGCACCTCGA
CCCCAAAAAACTTGATTTGGGTGATGGTTCACGTAGTGGGCCATCGCCCTGATAGACGGTTTTTCGCCCTTTGAC
GTTGGAGTCCACGTTCTTTAATAGTGGACTCTTGTTCCAAACTGGAACAACACTCAACTCTATCTCGGGCTATTCT
TTTGATTTATAAGGGATTTTGCCGATTTCGGTCTATTGGTTAAAAAATGAGCTGATTTAACAAAAATTTAACGCGAA
TTTTAACAAAATATTAACGTTTACAATTTTATGGTGCACTCTCAGTACAATCTGCTCTGATGCCGCATAGTTAAGCC
AGCCCCGACACCCGCCAACACCCGCTGACGCGCCCTGACGGGCTTGTCTGCTCCCGGCATCCGCTTACAGACA
AGCTGTGACCGTCTCCGGGAGCTGCATGTGTCAGAGGTTTTCACCGTCATCACCGAAACGCGCGAGACGAAAG
GGCCTCGTGATACGCCTATTTTTATAGGTTAATGTCATGATAATAATGGTTTCTTAGACGTCAGGTGGCACTTTTC
GGGGAAATGTGCGCGGAACCCCTATTTGTTTATTTTTCTAAATACATTCAAATATGTATCCGCTCATGAGACAATA
ACCCTGATAAATGCTTCAATAATATTGAAAAAGGAAGAGTATGAGTATTCAACATTTCCGTGTCGCCCTTATTCCC
TTTTTTGCGGCATTTTGCCTTCCTGTTTTTGCTCACCCAGAAACGCTGGTGAAAGTAAAAGATGCTGAAGATCAGT
TGGGTGCACGAGTGGGTTACATCGAACTGGATCTCAACAGCGGTAAGATCCTTGAGAGTTTTCGCCCCGAAGAA
CGTTTTCCAATGATGAGCACTTTTAAAGTTCTGCTATGTGGCGCGGTATTATCCCGTATTGACGCCGGGCAAGAG
CAACTCGGTCGCCGCATACACTATTCTCAGAATGACTTGGTTGAGTACTCACCAGTCACAGAAAAGCATCTTACG
GATGGCATGACAGTAAGAGAATTATGCAGTGCTGCCATAACCATGAGTGATAACACTGCGGCCAACTTACTTCTG
ACAACGATCGGAGGACCGAAGGAGCTAACCGCTTTTTTGCACAACATGGGGGATCATGTAACTCGCCTTGATCG
TTGGGAACCGGAGCTGAATGAAGCCATACCAAACGACGAGCGTGACACCACGATGCCTGTAGCAATGGCAACA
ACGTTGCGCAAACTATTAACTGGCGAACTACTTACTCTAGCTTCCCGGCAACAATTAATAGACTGGATGGAGGCG
GATAAAGTTGCAGGACCACTTCTGCGCTCGGCCCTTCCGGCTGGCTGGTTTATTGCTGATAAATCTGGAGCCGG
TGAGCGTGGAAGCCGCGGTATCATTGCAGCACTGGGGCCAGATGGTAAGCCCTCCCGTATCGTAGTTATCTACA
CGACGGGGAGTCAGGCAACTATGGATGAACGAAATAGACAGATCGCTGAGATAGGTGCCTCACTGATTAAGCAT
TGGTAACTGTCAGACCAAGTTTACTCATATATACTTTAGATTGATTTAAAACTTCATTTTTAATTTAAAAGGATCTAG
GTGAAGATCCTTTTTGATAATCTCATGACCAAAATCCCTTAACGTGAGTTTTCGTTCCACTGAGCGTCAGACCCC
GTAGAAAAGATCAAAGGATCTTCTTGAGATCCTTTTTTTCTGCGCGTAATCTGCTGCTTGCAAACAAAAAAACCAC
CGCTACCAGCGGTGGTTTGTTTGCCGGATCAAGAGCTACCAACTCTTTTTCCGAAGGTAACTGGCTTCAGCAGA
GCGCAGATACCAAATACTGTTCTTCTAGTGTAGCCGTAGTTAGGCCACCACTTCAAGAACTCTGTAGCACCGCCT
ACATACCTCGCTCTGCTAATCCTGTTACCAGTGGCTGCTGCCAGTGGCGATAAGTCGTGTCTTACCGGGTTGGA
CTCAAGACGATAGTTACCGGATAAGGCGCAGCGGTCGGGCTGAACGGGGGGTTCGTGCACACAGCCCAGCTTG
GAGCGAACGACCTACACCGAACTGAGATACCTACAGCGTGAGCTATGAGAAAGCGCCACGCTTCCCGAAGGGA
GAAAGGCGGACAGGTATCCGGTAAGCGGCAGGGTCGGAACAGGAGAGCGCACGAGGGAGCTTCCAGGGGGA
AACGCCTGGTATCTTTATAGTCCTGTCGGGTTTCGCCACCTCTGACTTGAGCGTCGATTTTTGTGATGCTCGTCA
GGGGGGCGGAGCCTATGGAAAAACGCCAGCAACGCGGCCTTTTTACGGTTCCTGGCCTTTTGCTGGCCTTTTG
CTCACATGT
pAAV-CMV-sadCas9-U6gRNA(Kcna1-sa_sgRNA2) used in in vitro qPCR experiments (SEQ ID NO: 57)
CCTGCAGGCAGCTGCGCGCTCGCTCGCTCACTGAGGCCGCCCGGGCGTCGGGCGACCTTTGGTCGCCCGGCC
TCAGTGAGCGAGCGAGCGCGCAGAGAGGGAGTGGCCAACTCCATCACTAGGGGTTCCTGCGGCCTCTAGACTC
GAGGCGTTGACATTGATTATTGACTAGTTATTAATAGTAATCAATTACGGGGTCATTAGTTCATAGCCCATATATG
GAGTTCCGCGTTACATAACTTACGGTAAATGGCCCGCCTGGCTGACCGCCCAACGACCCCCGCCCATTGACGT
CAATAATGACGTATGTTCCCATAGTAACGCCAATAGGGACTTTCCATTGACGTCAATGGGTGGAGTATTTACGGT
AAACTGCCCACTTGGCAGTACATCAAGTGTATCATATGCCAAGTACGCCCCCTATTGACGTCAATGACGGTAAAT
GGCCCGCCTGGCATTATGCCCAGTACATGACCTTATGGGACTTTCCTACTTGGCAGTACATCTACGTATTAGTCA
TCGCTATTACCATGGTGATGCGGTTTTGGCAGTACATCAATGGGCGTGGATAGCGGTTTGACTCACGGGGATTT
CCAAGTCTCCACCCCATTGACGTCAATGGGAGTTTGTTTTGGCACCAAAATCAACGGGACTTTCCAAAATGTCGT
AACAACTCCGCCCCATTGACGCAAATGGGCGGTAGGCGTGTACGGTGGGAGGTCTATATAAGCAGAGCTCTCT
GGCTAACTACCGGTGCCACCATGGCCCCAAAGAAGAAGCGGAAGGTCGGTATCCACGGAGTCCCAGCAGCCAA
GCGGAACTACATCCTGGGCCTGGCCATCGGCATCACCAGCGTGGGCTACGGCATCATCGACTACGAGACACGG
GACGTGATCGATGCCGGCGTGCGGCTGTTCAAAGAGGCCAACGTGGAAAACAACGAGGGCAGGCGGAGCAAG
AGAGGCGCCAGAAGGCTGAAGCGGCGGAGGCGGCATAGAATCCAGAGAGTGAAGAAGCTGCTGTTCGACTAC
AACCTGCTGACCGACCACAGCGAGCTGAGCGGCATCAACCCCTACGAGGCCAGAGTGAAGGGCCTGAGCCAG
AAGCTGAGCGAGGAAGAGTTCTCTGCCGCCCTGCTGCACCTGGCCAAGAGAAGAGGCGTGCACAACGTGAACG
AGGTGGAAGAGGACACCGGCAACGAGCTGTCCACCAAAGAGCAGATCAGCCGGAACAGCAAGGCCCTGGAAG
AGAAATACGTGGCCGAACTGCAGCTGGAACGGCTGAAGAAAGACGGCGAAGTGCGGGGCAGCATCAACAGATT
CAAGACCAGCGACTACGTGAAAGAAGCCAAACAGCTGCTGAAGGTGCAGAAGGCCTACCACCAGCTGGACCAG
AGCTTCATCGACACCTACATCGACCTGCTGGAAACCCGGCGGACCTACTATGAGGGACCTGGCGAGGGCAGCC
CCTTCGGCTGGAAGGACATCAAAGAATGGTACGAGATGCTGATGGGCCACTGCACCTACTTCCCCGAGGAACT
GCGGAGCGTGAAGTACGCCTACAACGCCGACCTGTACAACGCCCTGAACGACCTGAACAATCTCGTGATCACC
AGGGACGAGAACGAGAAGCTGGAATATTACGAGAAGTTCCAGATCATCGAGAACGTGTTCAAGCAGAAGAAGAA
GCCCACCCTGAAGCAGATCGCCAAAGAAATCCTCGTGAACGAAGAGGATATTAAGGGCTACAGAGTGACCAGCA
CCGGCAAGCCCGAGTTCACCAACCTGAAGGTGTACCACGACATCAAGGACATTACCGCCCGGAAAGAGATTATT
GAGAACGCCGAGCTGCTGGATCAGATTGCCAAGATCCTGACCATCTACCAGAGCAGCGAGGACATCCAGGAAG
AACTGACCAATCTGAACTCCGAGCTGACCCAGGAAGAGATCGAGCAGATCTCTAATCTGAAGGGCTATACCGGC
ACCCACAACCTGAGCCTGAAGGCCATCAACCTGATCCTGGACGAGCTGTGGCACACCAACGACAACCAGATCG
CTATCTTCAACCGGCTGAAGCTGGTGCCCAAGAAGGTGGACCTGTCCCAGCAGAAAGAGATCCCCACCACCCT
GGTGGACGACTTCATCCTGAGCCCCGTCGTGAAGAGAAGCTTCATCCAGAGCATCAAAGTGATCAACGCCATCA
TCAAGAAGTACGGCCTGCCCAACGACATCATTATCGAGCTGGCCCGCGAGAAGAACTCCAAGGACGCCCAGAA
AATGATCAACGAGATGCAGAAGCGGAACCGGCAGACCAACGAGCGGATCGAGGAAATCATCCGGACCACCGGC
AAAGAGAACGCCAAGTACCTGATCGAGAAGATCAAGCTGCACGACATGCAGGAAGGCAAGTGCCTGTACAGCC
TGGAAGCCATCCCTCTGGAAGATCTGCTGAACAACCCCTTCAACTATGAGGTGGACCACATCATCCCCAGAAGC
GTGTCCTTCGACAACAGCTTCAACAACAAGGTGCTCGTGAAGCAGGAAGAAGCCAGCAAGAAGGGCAACCGGA
CCCCATTCCAGTACCTGAGCAGCAGCGACAGCAAGATCAGCTACGAAACCTTCAAGAAGCACATCCTGAATCTG
GCCAAGGGCAAGGGCAGAATCAGCAAGACCAAGAAAGAGTATCTGCTGGAAGAACGGGACATCAACAGGTTCT
CCGTGCAGAAAGACTTCATCAACCGGAACCTGGTGGATACCAGATACGCCACCAGAGGCCTGATGAACCTGCT
GCGGAGCTACTTCAGAGTGAACAACCTGGACGTGAAAGTGAAGTCCATCAATGGCGGCTTCACCAGCTTTCTGC
GGCGGAAGTGGAAGTTTAAGAAAGAGCGGAACAAGGGGTACAAGCACCACGCCGAGGACGCCCTGATCATTGC
CAACGCCGATTTCATCTTCAAAGAGTGGAAGAAACTGGACAAGGCCAAAAAAGTGATGGAAAACCAGATGTTCG
AGGAAAAGCAGGCCGAGAGCATGCCCGAGATCGAAACCGAGCAGGAGTACAAAGAGATCTTCATCACCCCCCA
CCAGATCAAGCACATTAAGGACTTCAAGGACTACAAGTACAGCCACCGGGTGGACAAGAAGCCTAATAGAGAGC
TGATTAACGACACCCTGTACTCCACCCGGAAGGACGACAAGGGCAACACCCTGATCGTGAACAATCTGAACGGC
CTGTACGACAAGGACAATGACAAGCTGAAAAAGCTGATCAACAAGAGCCCCGAAAAGCTGCTGATGTACCACCA
CGACCCCCAGACCTACCAGAAACTGAAGCTGATTATGGAACAGTACGGCGACGAGAAGAATCCCCTGTACAAGT
ACTACGAGGAAACCGGGAACTACCTGACCAAGTACTCCAAAAAGGACAACGGCCCCGTGATCAAGAAGATTAAG
TATTACGGCAACAAACTGAACGCCCATCTGGACATCACCGACGACTACCCCAACAGCAGAAACAAGGTCGTGAA
GCTGTCCCTGAAGCCCTACAGATTCGACGTGTACCTGGACAATGGCGTGTACAAGTTCGTGACCGTGAAGAATC
TGGATGTGATCAAAAAAGAAAACTACTACGAAGTGAATAGCAAGTGCTATGAGGAAGCTAAGAAGCTGAAGAAGA
TCAGCAACCAGGCCGAGTTTATCGCCTCCTTCTACAACAACGATCTGATCAAGATCAACGGCGAGCTGTATAGA
GTGATCGGCGTGAACAACGACCTGCTGAACCGGATCGAAGTGAACATGATCGACATCACCTACCGCGAGTACCT
GGAAAACATGAACGACAAGAGGCCCCCCAGGATCATTAAGACAATCGCCTCCAAGACCCAGAGCATTAAGAAGT
ACAGCACAGACATTCTGGGCAACCTGTATGAAGTGAAATCTAAGAAGCACCCTCAGATCATCAAAAAGGGCAAAA
GGCCGGCGGCCACGAAAAAGGCCGGCCAGGCAAAAAAGAAAAAGGGATCCGGACGGGCTGACGCATTGGACG
ATTTTGATCTGGATATGCTGGGAAGTGACGCCCTCGATGATTTTGACCTTGACATGCTTGGTTCGGATGCCCTTG
ATGACTTTGACCTCGACATGCTCGGCAGTGACGCCCTTGATGATTTCGACCTGGACATGCTGATTAACTGTACAG
GCAGTGGAGAGGGCAGAGGAAGTCTGCTAACATGCGGTGACGTCGAGGAGAATCCTGGCCCAATGGCCAAGC
CTTTGTCTCAAGAAGAATCCACCCTCATTGAAAGAGCAACGGCTACAATCAACAGCATCCCCATCTCTGAAGACT
ACAGCGTCGCCAGCGCAGCTCTCTCTAGCGACGGCCGCATCTTCACTGGTGTCAATGTATATCATTTTACTGGG
GGACCTTGTGCAGAACTCGTGGTGCTGGGCACTGCTGCTGCTGCGGCAGCTGGCAACCTGACTTGTATCGTCG
CGATCGGAAATGAGAACAGGGGCATCTTGAGCCCCTGCGGACGGTGCCGACAGGTGCTTCTCGATCTGCATCC
TGGGATCAAAGCCATAGTGAAGGACAGTGATGGACAGCCGACGGCAGTTGGGATTCGTGAATTGCTGCCCTCT
GGTTATGTGTGGGAGGGCTAAGAATTCCTAGAGCTCGCTGATCAGCCTCGACTGTGCCTTCTAGTTGCCAGCCA
TCTGTTGTTTGCCCCTCCCCCGTGCCTTCCTTGACCCTGGAAGGTGCCACTCCCACTGTCCTTTCCTAATAAAAT
GAGGAAATTGCATCGCATTGTCTGAGTAGGTGTCATTCTATTCTGGGGGGTGGGGGGGGCAGGACAGCAAGG
GGGAGGATTGGGAAGAGAATAGCAGGCATGCTGGGGAGGTACCGAGGGCCTATTTCCCATGATTCCTTCATATT
TGCATATACGATACAAGGCTGTTAGAGAGATAATTGGAATTAATTTGACTGTAAACACAAAGATATTAGTACAAAA
TACGTGACGTAGAAAGTAATAATTTCTTGGGTAGTTTGCAGTTTTAAAATTATGTTTTAAAATGGACTATCATATGC
TTACCGTAACTTGAAAGTATTTCGATTTCTTGGCTTTATATATCTTGTGGAAAGGACGAAAcaccgCCTTACTAGCC
ACAATAGAGCgTTTTAGTACTCTGGAAACAGAATCTACTAAAACAAGGCAAAATGCCGTGTTTATCTCGTCAACTT
GTTGGCGAGATTTTTGCGGCCGCAGGAACCCCTAGTGATGGAGTTGGCCACTCCCTCTCTGCGCGCTCGCTCG
CTCACTGAGGCCGGGCGACCAAAGGTCGCCCGACGCCCGGGCTTTGCCCGGGGGGCCTCAGTGAGCGAGCG
AGCGCGCAGCTGCCTGCAGGGGCGCCTGATGCGGTATTTTCTCCTTACGCATCTGTGCGGTATTTCACACCGCA
TACGTCAAAGCAACCATAGTACGCGCCCTGTAGCGGCGCATTAAGCGCGGCGGGTGTGGTGGTTACGCGCAGC
GTGACCGCTACACTTGCCAGCGCCTTAGCGCCCGCTCCTTTCGCTTTCTTCCCTTCCTTTCTCGCCACGTTCGC
CGGCTTTCCCCGTCAAGCTCTAAATCGGGGGCTCCCTTTAGGGTTCCGATTTAGTGCTTTACGGCACCTCGACC
CCAAAAAACTTGATTTGGGTGATGGTTCACGTAGTGGGCCATCGCCCTGATAGACGGTTTTTCGCCCTTTGACGT
TGGAGTCCACGTTCTTTAATAGTGGACTCTTGTTCCAAACTGGAACAACACTCAACTCTATCTCGGGCTATTCTTT
TGATTTATAAGGGATTTTGCCGATTTCGGTCTATTGGTTAAAAAATGAGCTGATTTAACAAAAATTTAACGCGAATT
TTAACAAAATATTAACGTTTACAATTTTATGGTGCACTCTCAGTACAATCTGCTCTGATGCCGCATAGTTAAGCCA
GCCCCGACACCCGCCAACACCCGCTGACGCGCCCTGACGGGCTTGTCTGCTCCCGGCATCCGCTTACAGACAA
GCTGTGACCGTCTCCGGGAGCTGCATGTGTCAGAGGTTTTCACCGTCATCACCGAAACGCGCGAGACGAAAGG
GCCTCGTGATACGCCTATTTTTATAGGTTAATGTCATGATAATAATGGTTTCTTAGACGTCAGGTGGCACTTTTCG
GGGAAATGTGCGCGGAACCCCTATTTGTTTATTTTTCTAAATACATTCAAATATGTATCCGCTCATGAGACAATAA
CCCTGATAAATGCTTCAATAATATTGAAAAAGGAAGAGTATGAGTATTCAACATTTCCGTGTCGCCCTTATTCCCT
TTTTTGCGGCATTTTGCCTTCCTGTTTTTGCTCACCCAGAAACGCTGGTGAAAGTAAAAGATGCTGAAGATCAGTT
GGGTGCACGAGTGGGTTACATCGAACTGGATCTCAACAGCGGTAAGATCCTTGAGAGTTTTCGCCCCGAAGAAC
GTTTTCCAATGATGAGCACTTTTAAAGTTCTGCTATGTGGCGCGGTATTATCCCGTATTGACGCCGGGCAAGAGC
AACTCGGTCGCCGCATACACTATTCTCAGAATGACTTGGTTGAGTACTCACCAGTCACAGAAAAGCATCTTACGG
ATGGCATGACAGTAAGAGAATTATGCAGTGCTGCCATAACCATGAGTGATAACACTGCGGCCAACTTACTTCTGA
CAACGATCGGAGGACCGAAGGAGCTAACCGCTTTTTTGCACAACATGGGGGATCATGTAACTCGCCTTGATCGT
TGGGAACCGGAGCTGAATGAAGCCATACCAAACGACGAGCGTGACACCACGATGCCTGTAGCAATGGCAACAA
CGTTGCGCAAACTATTAACTGGCGAACTACTTACTCTAGCTTCCCGGCAACAATTAATAGACTGGATGGAGGCG
GATAAAGTTGCAGGACCACTTCTGCGCTCGGCCCTTCCGGCTGGCTGGTTTATTGCTGATAAATCTGGAGCCGG
TGAGCGTGGAAGCCGCGGTATCATTGCAGCACTGGGGCCAGATGGTAAGCCCTCCCGTATCGTAGTTATCTACA
CGACGGGGAGTCAGGCAACTATGGATGAACGAAATAGACAGATCGCTGAGATAGGTGCCTCACTGATTAAGCAT
TGGTAACTGTCAGACCAAGTTTACTCATATATACTTTAGATTGATTTAAAACTTCATTTTTAATTTAAAAGGATCTAG
GTGAAGATCCTTTTTGATAATCTCATGACCAAAATCCCTTAACGTGAGTTTTCGTTCCACTGAGCGTCAGACCCC
GTAGAAAAGATCAAAGGATCTTCTTGAGATCCTTTTTTTCTGCGCGTAATCTGCTGCTTGCAAACAAAAAAACCAC
CGCTACCAGCGGTGGTTTGTTTGCCGGATCAAGAGCTACCAACTCTTTTTCCGAAGGTAACTGGCTTCAGCAGA
GCGCAGATACCAAATACTGTTCTTCTAGTGTAGCCGTAGTTAGGCCACCACTTCAAGAACTCTGTAGCACCGCCT
ACATACCTCGCTCTGCTAATCCTGTTACCAGTGGCTGCTGCCAGTGGCGATAAGTCGTGTCTTACCGGGTTGGA
CTCAAGACGATAGTTACCGGATAAGGCGCAGCGGTCGGGCTGAACGGGGGGTTCGTGCACACAGCCCAGCTTG
GAGCGAACGACCTACACCGAACTGAGATACCTACAGCGTGAGCTATGAGAAAGCGCCACGCTTCCCGAAGGGA
GAAAGGCGGACAGGTATCCGGTAAGCGGCAGGGTCGGAACAGGAGAGCGCACGAGGGAGCTTCCAGGGGGA
AACGCCTGGTATCTTTATAGTCCTGTCGGGTTTCGCCACCTCTGACTTGAGCGTCGATTTTTGTGATGCTCGTCA
GGGGGGCGGAGCCTATGGAAAAACGCCAGCAACGCGGCCTTTTTACGGTTCCTGGCCTTTTGCTGGCCTTTTG
CTCACATGT
pAAV-CMV-sadCas9-U6gRNA(Kcna1-sa_sgRNA3) used in in vitro qPCR experiments (SEQ ID NO: 58)
CCTGCAGGCAGCTGCGCGCTCGCTCGCTCACTGAGGCCGCCCGGGCGTCGGGCGACCTTTGGTCGCCCGGCC
TCAGTGAGCGAGCGAGCGCGCAGAGAGGGAGTGGCCAACTCCATCACTAGGGGTTCCTGCGGCCTCTAGACTC
GAGGCGTTGACATTGATTATTGACTAGTTATTAATAGTAATCAATTACGGGGTCATTAGTTCATAGCCCATATATG
GAGTTCCGCGTTACATAACTTACGGTAAATGGCCCGCCTGGCTGACCGCCCAACGACCCCCGCCCATTGACGT
CAATAATGACGTATGTTCCCATAGTAACGCCAATAGGGACTTTCCATTGACGTCAATGGGTGGAGTATTTACGGT
AAACTGCCCACTTGGCAGTACATCAAGTGTATCATATGCCAAGTACGCCCCCTATTGACGTCAATGACGGTAAAT
GGCCCGCCTGGCATTATGCCCAGTACATGACCTTATGGGACTTTCCTACTTGGCAGTACATCTACGTATTAGTCA
TCGCTATTACCATGGTGATGCGGTTTTGGCAGTACATCAATGGGCGTGGATAGCGGTTTGACTCACGGGGATTT
CCAAGTCTCCACCCCATTGACGTCAATGGGAGTTTGTTTTGGCACCAAAATCAACGGGACTTTCCAAAATGTCGT
AACAACTCCGCCCCATTGACGCAAATGGGCGGTAGGCGTGTACGGTGGGAGGTCTATATAAGCAGAGCTCTCT
GGCTAACTACCGGTGCCACCATGGCCCCAAAGAAGAAGCGGAAGGTCGGTATCCACGGAGTCCCAGCAGCCAA
GCGGAACTACATCCTGGGCCTGGCCATCGGCATCACCAGCGTGGGCTACGGCATCATCGACTACGAGACACGG
GACGTGATCGATGCCGGCGTGCGGCTGTTCAAAGAGGCCAACGTGGAAAACAACGAGGGCAGGCGGAGCAAG
AGAGGCGCCAGAAGGCTGAAGCGGCGGAGGCGGCATAGAATCCAGAGAGTGAAGAAGCTGCTGTTCGACTAC
AACCTGCTGACCGACCACAGCGAGCTGAGCGGCATCAACCCCTACGAGGCCAGAGTGAAGGGCCTGAGCCAG
AAGCTGAGCGAGGAAGAGTTCTCTGCCGCCCTGCTGCACCTGGCCAAGAGAAGAGGCGTGCACAACGTGAACG
AGGTGGAAGAGGACACCGGCAACGAGCTGTCCACCAAAGAGCAGATCAGCCGGAACAGCAAGGCCCTGGAAG
AGAAATACGTGGCCGAACTGCAGCTGGAACGGCTGAAGAAAGACGGCGAAGTGCGGGGCAGCATCAACAGATT
CAAGACCAGCGACTACGTGAAAGAAGCCAAACAGCTGCTGAAGGTGCAGAAGGCCTACCACCAGCTGGACCAG
AGCTTCATCGACACCTACATCGACCTGCTGGAAACCCGGCGGACCTACTATGAGGGACCTGGCGAGGGCAGCC
CCTTCGGCTGGAAGGACATCAAAGAATGGTACGAGATGCTGATGGGCCACTGCACCTACTTCCCCGAGGAACT
GCGGAGCGTGAAGTACGCCTACAACGCCGACCTGTACAACGCCCTGAACGACCTGAACAATCTCGTGATCACC
AGGGACGAGAACGAGAAGCTGGAATATTACGAGAAGTTCCAGATCATCGAGAACGTGTTCAAGCAGAAGAAGAA
GCCCACCCTGAAGCAGATCGCCAAAGAAATCCTCGTGAACGAAGAGGATATTAAGGGCTACAGAGTGACCAGCA
CCGGCAAGCCCGAGTTCACCAACCTGAAGGTGTACCACGACATCAAGGACATTACCGCCCGGAAAGAGATTATT
GAGAACGCCGAGCTGCTGGATCAGATTGCCAAGATCCTGACCATCTACCAGAGCAGCGAGGACATCCAGGAAG
AACTGACCAATCTGAACTCCGAGCTGACCCAGGAAGAGATCGAGCAGATCTCTAATCTGAAGGGCTATACCGGC
ACCCACAACCTGAGCCTGAAGGCCATCAACCTGATCCTGGACGAGCTGTGGCACACCAACGACAACCAGATCG
CTATCTTCAACCGGCTGAAGCTGGTGCCCAAGAAGGTGGACCTGTCCCAGCAGAAAGAGATCCCCACCACCCT
GGTGGACGACTTCATCCTGAGCCCCGTCGTGAAGAGAAGCTTCATCCAGAGCATCAAAGTGATCAACGCCATCA
TCAAGAAGTACGGCCTGCCCAACGACATCATTATCGAGCTGGCCCGCGAGAAGAACTCCAAGGACGCCCAGAA
AATGATCAACGAGATGCAGAAGCGGAACCGGCAGACCAACGAGCGGATCGAGGAAATCATCCGGACCACCGGC
AAAGAGAACGCCAAGTACCTGATCGAGAAGATCAAGCTGCACGACATGCAGGAAGGCAAGTGCCTGTACAGCC
TGGAAGCCATCCCTCTGGAAGATCTGCTGAACAACCCCTTCAACTATGAGGTGGACCACATCATCCCCAGAAGC
GTGTCCTTCGACAACAGCTTCAACAACAAGGTGCTCGTGAAGCAGGAAGAAGCCAGCAAGAAGGGCAACCGGA
CCCCATTCCAGTACCTGAGCAGCAGCGACAGCAAGATCAGCTACGAAACCTTCAAGAAGCACATCCTGAATCTG
GCCAAGGGCAAGGGCAGAATCAGCAAGACCAAGAAAGAGTATCTGCTGGAAGAACGGGACATCAACAGGTTCT
CCGTGCAGAAAGACTTCATCAACCGGAACCTGGTGGATACCAGATACGCCACCAGAGGCCTGATGAACCTGCT
GCGGAGCTACTTCAGAGTGAACAACCTGGACGTGAAAGTGAAGTCCATCAATGGCGGCTTCACCAGCTTTCTGC
GGCGGAAGTGGAAGTTTAAGAAAGAGCGGAACAAGGGGTACAAGCACCACGCCGAGGACGCCCTGATCATTGC
CAACGCCGATTTCATCTTCAAAGAGTGGAAGAAACTGGACAAGGCCAAAAAAGTGATGGAAAACCAGATGTTCG
AGGAAAAGCAGGCCGAGAGCATGCCCGAGATCGAAACCGAGCAGGAGTACAAAGAGATCTTCATCACCCCCCA
CCAGATCAAGCACATTAAGGACTTCAAGGACTACAAGTACAGCCACCGGGTGGACAAGAAGCCTAATAGAGAGC
TGATTAACGACACCCTGTACTCCACCCGGAAGGACGACAAGGGCAACACCCTGATCGTGAACAATCTGAACGGC
CTGTACGACAAGGACAATGACAAGCTGAAAAAGCTGATCAACAAGAGCCCCGAAAAGCTGCTGATGTACCACCA
CGACCCCCAGACCTACCAGAAACTGAAGCTGATTATGGAACAGTACGGCGACGAGAAGAATCCCCTGTACAAGT
ACTACGAGGAAACCGGGAACTACCTGACCAAGTACTCCAAAAAGGACAACGGCCCCGTGATCAAGAAGATTAAG
TATTACGGCAACAAACTGAACGCCCATCTGGACATCACCGACGACTACCCCAACAGCAGAAACAAGGTCGTGAA
GCTGTCCCTGAAGCCCTACAGATTCGACGTGTACCTGGACAATGGCGTGTACAAGTTCGTGACCGTGAAGAATC
TGGATGTGATCAAAAAAGAAAACTACTACGAAGTGAATAGCAAGTGCTATGAGGAAGCTAAGAAGCTGAAGAAGA
TCAGCAACCAGGCCGAGTTTATCGCCTCCTTCTACAACAACGATCTGATCAAGATCAACGGCGAGCTGTATAGA
GTGATCGGCGTGAACAACGACCTGCTGAACCGGATCGAAGTGAACATGATCGACATCACCTACCGCGAGTACCT
GGAAAACATGAACGACAAGAGGCCCCCCAGGATCATTAAGACAATCGCCTCCAAGACCCAGAGCATTAAGAAGT
ACAGCACAGACATTCTGGGCAACCTGTATGAAGTGAAATCTAAGAAGCACCCTCAGATCATCAAAAAGGGCAAAA
GGCCGGCGGCCACGAAAAAGGCCGGCCAGGCAAAAAAGAAAAAGGGATCCGGACGGGCTGACGCATTGGACG
ATTTTGATCTGGATATGCTGGGAAGTGACGCCCTCGATGATTTTGACCTTGACATGCTTGGTTCGGATGCCCTTG
ATGACTTTGACCTCGACATGCTCGGCAGTGACGCCCTTGATGATTTCGACCTGGACATGCTGATTAACTGTACAG
GCAGTGGAGAGGGCAGAGGAAGTCTGCTAACATGCGGTGACGTCGAGGAGAATCCTGGCCCAATGGCCAAGC
CTTTGTCTCAAGAAGAATCCACCCTCATTGAAAGAGCAACGGCTACAATCAACAGCATCCCCATCTCTGAAGACT
ACAGCGTCGCCAGCGCAGCTCTCTCTAGCGACGGCCGCATCTTCACTGGTGTCAATGTATATCATTTTACTGGG
GGACCTTGTGCAGAACTCGTGGTGCTGGGCACTGCTGCTGCTGCGGCAGCTGGCAACCTGACTTGTATCGTCG
CGATCGGAAATGAGAACAGGGGCATCTTGAGCCCCTGCGGACGGTGCCGACAGGTGCTTCTCGATCTGCATCC
TGGGATCAAAGCCATAGTGAAGGACAGTGATGGACAGCCGACGGCAGTTGGGATTCGTGAATTGCTGCCCTCT
GGTTATGTGTGGGAGGGCTAAGAATTCCTAGAGCTCGCTGATCAGCCTCGACTGTGCCTTCTAGTTGCCAGCCA
TCTGTTGTTTGCCCCTCCCCCGTGCCTTCCTTGACCCTGGAAGGTGCCACTCCCACTGTCCTTTCCTAATAAAAT
GAGGAAATTGCATCGCATTGTCTGAGTAGGTGTCATTCTATTCTGGGGGGTGGGGTGGGGCAGGACAGCAAGG
GGGAGGATTGGGAAGAGAATAGCAGGCATGCTGGGGAGGTACCGAGGGCCTATTTCCCATGATTCCTTCATATT
TGCATATACGATACAAGGCTGTTAGAGAGATAATTGGAATTAATTTGACTGTAAACACAAAGATATTAGTACAAAA
TACGTGACGTAGAAAGTAATAATTTCTTGGGTAGTTTGCAGTTTTAAAATTATGTTTTAAAATGGACTATCATATGC
TTACCGTAACTTGAAAGTATTTCGATTTCTTGGCTTTATATATCTTGTGGAAAGGACGAAAcaccgTGTGATCATTGA
CTTTGATTAgTTTTAGTACTCTGGAAACAGAATCTACTAAAACAAGGCAAAATGCCGTGTTTATCTCGTCAACTTGT
TGGCGAGATTTTTGCGGCCGCAGGAACCCCTAGTGATGGAGTTGGCCACTCCCTCTCTGCGCGCTCGCTCGCT
CACTGAGGCCGGGCGACCAAAGGTCGCCCGACGCCCGGGCTTTGCCCGGGGGGCCTCAGTGAGCGAGCGAG
CGCGCAGCTGCCTGCAGGGGCGCCTGATGCGGTATTTTCTCCTTACGCATCTGTGCGGTATTTCACACCGCATA
CGTCAAAGCAACCATAGTACGCGCCCTGTAGCGGCGCATTAAGCGCGGCGGGTGTGGTGGTTACGCGCAGCGT
GACCGCTACACTTGCCAGCGCCTTAGCGCCCGCTCCTTTCGCTTTCTTCCCTTCCTTTCTCGCCACGTTCGCCG
GCTTTCCCCGTCAAGCTCTAAATCGGGGGCTCCCTTTAGGGTTCCGATTTAGTGCTTTACGGCACCTCGACCCC
AAAAAACTTGATTTGGGTGATGGTTCACGTAGTGGGCCATCGCCCTGATAGACGGTTTTTCGCCCTTTGACGTTG
GAGTCCACGTTCTTTAATAGTGGACTCTTGTTCCAAACTGGAACAACACTCAACTCTATCTCGGGCTATTCTTTTG
ATTTATAAGGGATTTTGCCGATTTCGGTCTATTGGTTAAAAAATGAGCTGATTTAACAAAAATTTAACGCGAATTTT
AACAAAATATTAACGTTTACAATTTTATGGTGCACTCTCAGTACAATCTGCTCTGATGCCGCATAGTTAAGCCAGC
CCCGACACCCGCCAACACCCGCTGACGCGCCCTGACGGGCTTGTCTGCTCCCGGCATCCGCTTACAGACAAGC
TGTGACCGTCTCCGGGAGCTGCATGTGTCAGAGGTTTTCACCGTCATCACCGAAACGCGCGAGACGAAAGGGC
CTCGTGATACGCCTATTTTTATAGGTTAATGTCATGATAATAATGGTTTCTTAGACGTCAGGTGGCACTTTTCGGG
GAAATGTGCGCGGAACCCCTATTTGTTTATTTTTCTAAATACATTCAAATATGTATCCGCTCATGAGACAATAACC
CTGATAAATGCTTCAATAATATTGAAAAAGGAAGAGTATGAGTATTCAACATTTCCGTGTCGCCCTTATTCCCTTTT
TTGCGGCATTTTGCCTTCCTGTTTTTGCTCACCCAGAAACGCTGGTGAAAGTAAAAGATGCTGAAGATCAGTTGG
GTGCACGAGTGGGTTACATCGAACTGGATCTCAACAGCGGTAAGATCCTTGAGAGTTTTCGCCCCGAAGAACGT
TTTCCAATGATGAGCACTTTTAAAGTTCTGCTATGTGGCGCGGTATTATCCCGTATTGACGCCGGGCAAGAGCAA
CTCGGTCGCCGCATACACTATTCTCAGAATGACTTGGTTGAGTACTCACCAGTCACAGAAAAGCATCTTACGGAT
GGCATGACAGTAAGAGAATTATGCAGTGCTGCCATAACCATGAGTGATAACACTGCGGCCAACTTACTTCTGACA
ACGATCGGAGGACCGAAGGAGCTAACCGCTTTTTTGCACAACATGGGGGATCATGTAACTCGCCTTGATCGTTG
GGAACCGGAGCTGAATGAAGCCATACCAAACGACGAGCGTGACACCACGATGCCTGTAGCAATGGCAACAACG
TTGCGCAAACTATTAACTGGCGAACTACTTACTCTAGCTTCCCGGCAACAATTAATAGACTGGATGGAGGOGGAT
AAAGTTGCAGGACCACTTCTGCGCTCGGCCCTTCCGGCTGGCTGGTTTATTGCTGATAAATCTGGAGCCGGTGA
GCGTGGAAGCCGCGGTATCATTGCAGCACTGGGGCCAGATGGTAAGCCCTCCCGTATCGTAGTTATCTACACG
ACGGGGAGTCAGGCAACTATGGATGAACGAAATAGACAGATCGCTGAGATAGGTGCCTCACTGATTAAGCATTG
GTAACTGTCAGACCAAGTTTACTCATATATACTTTAGATTGATTTAAAACTTCATTTTTAATTTAAAAGGATCTAGGT
GAAGATCCTTTTTGATAATCTCATGACCAAAATCCCTTAACGTGAGTTTTCGTTCCACTGAGCGTCAGACCCCGTA
GAAAAGATCAAAGGATCTTCTTGAGATCCTTTTTTTCTGCGCGTAATCTGCTGCTTGCAAACAAAAAAACCACCGC
TACCAGCGGTGGTTTGTTTGCCGGATCAAGAGCTACCAACTCTTTTTCCGAAGGTAACTGGCTTCAGCAGAGCG
CAGATACCAAATACTGTTCTTCTAGTGTAGCCGTAGTTAGGCCACCACTTCAAGAACTCTGTAGCACCGCCTACA
TACCTCGCTCTGCTAATCCTGTTACCAGTGGCTGCTGCCAGTGGCGATAAGTCGTGTCTTACCGGGTTGGACTC
AAGACGATAGTTACCGGATAAGGCGCAGCGGTCGGGCTGAACGGGGGGTTCGTGCACACAGCCCAGCTTGGA
GCGAACGACCTACACCGAACTGAGATACCTACAGCGTGAGCTATGAGAAAGCGCCACGCTTCCCGAAGGGAGA
AAGGCGGACAGGTATCCGGTAAGCGGCAGGGTCGGAACAGGAGAGCGCACGAGGGAGCTTCCAGGGGGAAAC
GCCTGGTATCTTTATAGTCCTGTCGGGTTTCGCCACCTCTGACTTGAGCGTCGATTTTTGTGATGCTCGTCAGGG
GGGCGGAGCCTATGGAAAAACGCCAGCAACGCGGCCTTTTTACGGTTCCTGGCCTTTTGCTGGCCTTTTGCTCA
CATGT
pAAV-CMV-sadCas9-U6gRNA(Kcna1-sa_sgRNA4) used in in vitro qPCR experiments (SEQ ID NO: 59)
CCTGCAGGCAGCTGCGCGCTCGCTCGCTCACTGAGGCCGCCCGGGCGTCGGGCGACCTTTGGTCGCCCGGCC
TCAGTGAGCGAGCGAGCGCGCAGAGAGGGAGTGGCCAACTCCATCACTAGGGGTTCCTGCGGCCTCTAGACTC
GAGGCGTTGACATTGATTATTGACTAGTTATTAATAGTAATCAATTACGGGGTCATTAGTTCATAGCCCATATATG
GAGTTCCGCGTTACATAACTTACGGTAAATGGCCCGCCTGGCTGACCGCCCAACGACCCCCGCCCATTGACGT
CAATAATGACGTATGTTCCCATAGTAACGCCAATAGGGACTTTCCATTGACGTCAATGGGTGGAGTATTTACGGT
AAACTGCCCACTTGGCAGTACATCAAGTGTATCATATGCCAAGTACGCCCCCTATTGACGTCAATGACGGTAAAT
GGCCCGCCTGGCATTATGCCCAGTACATGACCTTATGGGACTTTCCTACTTGGCAGTACATCTACGTATTAGTCA
TCGCTATTACCATGGTGATGCGGTTTTGGCAGTACATCAATGGGCGTGGATAGCGGTTTGACTCACGGGGATTT
CCAAGTCTCCACCCCATTGACGTCAATGGGAGTTTGTTTTGGCACCAAAATCAACGGGACTTTCCAAAATGTCGT
AACAACTCCGCCCCATTGACGCAAATGGGCGGTAGGCGTGTACGGTGGGAGGTCTATATAAGCAGAGCTCTCT
GGCTAACTACCGGTGCCACCATGGCCCCAAAGAAGAAGCGGAAGGTCGGTATCCACGGAGTCCCAGCAGCCAA
GCGGAACTACATCCTGGGCCTGGCCATCGGCATCACCAGCGTGGGCTACGGCATCATCGACTACGAGACACGG
GACGTGATCGATGCCGGCGTGCGGCTGTTCAAAGAGGCCAACGTGGAAAACAACGAGGGCAGGCGGAGCAAG
AGAGGCGCCAGAAGGCTGAAGCGGCGGAGGCGGCATAGAATCCAGAGAGTGAAGAAGCTGCTGTTCGACTAC
AACCTGCTGACCGACCACAGCGAGCTGAGCGGCATCAACCCCTACGAGGCCAGAGTGAAGGGCCTGAGCCAG
AAGCTGAGCGAGGAAGAGTTCTCTGCCGCCCTGCTGCACCTGGCCAAGAGAAGAGGCGTGCACAACGTGAACG
AGGTGGAAGAGGACACCGGCAACGAGCTGTCCACCAAAGAGCAGATCAGCCGGAACAGCAAGGCCCTGGAAG
AGAAATACGTGGCCGAACTGCAGCTGGAACGGCTGAAGAAAGACGGCGAAGTGCGGGGCAGCATCAACAGATT
CAAGACCAGCGACTACGTGAAAGAAGCCAAACAGCTGCTGAAGGTGCAGAAGGCCTACCACCAGCTGGACCAG
AGCTTCATCGACACCTACATCGACCTGCTGGAAACCCGGCGGACCTACTATGAGGGACCTGGCGAGGGCAGCC
CCTTCGGCTGGAAGGACATCAAAGAATGGTACGAGATGCTGATGGGCCACTGCACCTACTTCCCCGAGGAACT
GCGGAGCGTGAAGTACGCCTACAACGCCGACCTGTACAACGCCCTGAACGACCTGAACAATCTCGTGATCACC
AGGGACGAGAACGAGAAGCTGGAATATTACGAGAAGTTCCAGATCATCGAGAACGTGTTCAAGCAGAAGAAGAA
GCCCACCCTGAAGCAGATCGCCAAAGAAATCCTCGTGAACGAAGAGGATATTAAGGGCTACAGAGTGACCAGCA
CCGGCAAGCCCGAGTTCACCAACCTGAAGGTGTACCACGACATCAAGGACATTACCGCCCGGAAAGAGATTATT
GAGAACGCCGAGCTGCTGGATCAGATTGCCAAGATCCTGACCATCTACCAGAGCAGCGAGGACATCCAGGAAG
AACTGACCAATCTGAACTCCGAGCTGACCCAGGAAGAGATCGAGCAGATCTCTAATCTGAAGGGCTATACCGGC
ACCCACAACCTGAGCCTGAAGGCCATCAACCTGATCCTGGACGAGCTGTGGCACACCAACGACAACCAGATCG
CTATCTTCAACCGGCTGAAGCTGGTGCCCAAGAAGGTGGACCTGTCCCAGCAGAAAGAGATCCCCACCACCCT
GGTGGACGACTTCATCCTGAGCCCCGTCGTGAAGAGAAGCTTCATCCAGAGCATCAAAGTGATCAACGCCATCA
TCAAGAAGTACGGCCTGCCCAACGACATCATTATCGAGCTGGCCCGCGAGAAGAACTCCAAGGACGCCCAGAA
AATGATCAACGAGATGCAGAAGCGGAACCGGCAGACCAACGAGCGGATCGAGGAAATCATCCGGACCACCGGC
AAAGAGAACGCCAAGTACCTGATCGAGAAGATCAAGCTGCACGACATGCAGGAAGGCAAGTGCCTGTACAGCC
TGGAAGCCATCCCTCTGGAAGATCTGCTGAACAACCCCTTCAACTATGAGGTGGACCACATCATCCCCAGAAGC
GTGTCCTTCGACAACAGCTTCAACAACAAGGTGCTCGTGAAGCAGGAAGAAGCCAGCAAGAAGGGCAACCGGA
CCCCATTCCAGTACCTGAGCAGCAGCGACAGCAAGATCAGCTACGAAACCTTCAAGAAGCACATCCTGAATCTG
GCCAAGGGCAAGGGCAGAATCAGCAAGACCAAGAAAGAGTATCTGCTGGAAGAACGGGACATCAACAGGTTCT
CCGTGCAGAAAGACTTCATCAACCGGAACCTGGTGGATACCAGATACGCCACCAGAGGCCTGATGAACCTGCT
GCGGAGCTACTTCAGAGTGAACAACCTGGACGTGAAAGTGAAGTCCATCAATGGCGGCTTCACCAGCTTTCTGC
GGCGGAAGTGGAAGTTTAAGAAAGAGCGGAACAAGGGGTACAAGCACCACGCCGAGGACGCCCTGATCATTGC
CAACGCCGATTTCATCTTCAAAGAGTGGAAGAAACTGGACAAGGCCAAAAAAGTGATGGAAAACCAGATGTTCG
AGGAAAAGCAGGCCGAGAGCATGCCCGAGATCGAAACCGAGCAGGAGTACAAAGAGATCTTCATCACCCCCCA
CCAGATCAAGCACATTAAGGACTTCAAGGACTACAAGTACAGCCACCGGGTGGACAAGAAGCCTAATAGAGAGC
TGATTAACGACACCCTGTACTCCACCCGGAAGGACGACAAGGGCAACACCCTGATCGTGAACAATCTGAACGGC
CTGTACGACAAGGACAATGACAAGCTGAAAAAGCTGATCAACAAGAGCCCCGAAAAGCTGCTGATGTACCACCA
CGACCCCCAGACCTACCAGAAACTGAAGCTGATTATGGAACAGTACGGCGACGAGAAGAATCCCCTGTACAAGT
ACTACGAGGAAACCGGGAACTACCTGACCAAGTACTCCAAAAAGGACAACGGCCCCGTGATCAAGAAGATTAAG
TATTACGGCAACAAACTGAACGCCCATCTGGACATCACCGACGACTACCCCAACAGCAGAAACAAGGTCGTGAA
GCTGTCCCTGAAGCCCTACAGATTCGACGTGTACCTGGACAATGGCGTGTACAAGTTCGTGACCGTGAAGAATC
TGGATGTGATCAAAAAAGAAAACTACTACGAAGTGAATAGCAAGTGCTATGAGGAAGCTAAGAAGCTGAAGAAGA
TCAGCAACCAGGCCGAGTTTATCGCCTCCTTCTACAACAACGATCTGATCAAGATCAACGGCGAGCTGTATAGA
GTGATCGGCGTGAACAACGACCTGCTGAACCGGATCGAAGTGAACATGATCGACATCACCTACCGCGAGTACCT
GGAAAACATGAACGACAAGAGGCCCCCCAGGATCATTAAGACAATCGCCTCCAAGACCCAGAGCATTAAGAAGT
ACAGCACAGACATTCTGGGCAACCTGTATGAAGTGAAATCTAAGAAGCACCCTCAGATCATCAAAAAGGGCAAAA
GGCCGGCGGCCACGAAAAAGGCCGGCCAGGCAAAAAAGAAAAAGGGATCCGGACGGGCTGACGCATTGGACG
ATTTTGATCTGGATATGCTGGGAAGTGACGCCCTCGATGATTTTGACCTTGACATGCTTGGTTCGGATGCCCTTG
ATGACTTTGACCTCGACATGCTCGGCAGTGACGCCCTTGATGATTTCGACCTGGACATGCTGATTAACTGTACAG
GCAGTGGAGAGGGCAGAGGAAGTCTGCTAACATGCGGTGACGTCGAGGAGAATCCTGGCCCAATGGCCAAGC
CTTTGTCTCAAGAAGAATCCACCCTCATTGAAAGAGCAACGGCTACAATCAACAGCATCCCCATCTCTGAAGACT
ACAGCGTCGCCAGCGCAGCTCTCTCTAGCGACGGCCGCATCTTCACTGGTGTCAATGTATATCATTTTACTGGG
GGACCTTGTGCAGAACTCGTGGTGCTGGGCACTGCTGCTGCTGCGGCAGCTGGCAACCTGACTTGTATCGTCG
CGATCGGAAATGAGAACAGGGGCATCTTGAGCCCCTGCGGACGGTGCCGACAGGTGCTTCTCGATCTGCATCC
TGGGATCAAAGCCATAGTGAAGGACAGTGATGGACAGCCGACGGCAGTTGGGATTCGTGAATTGCTGCCCTCT
GGTTATGTGTGGGAGGGCTAAGAATTCCTAGAGCTCGCTGATCAGCCTCGACTGTGCCTTCTAGTTGCCAGCCA
TCTGTTGTTTGCCCCTCCCCCGTGCCTTCCTTGACCCTGGAAGGTGCCACTCCCACTGTCCTTTCCTAATAAAAT
GAGGAAATTGCATCGCATTGTCTGAGTAGGTGTCATTCTATTCTGGGGGGTGGGGTGGGGCAGGACAGCAAGG
GGGAGGATTGGGAAGAGAATAGCAGGCATGCTGGGGAGGTACCGAGGGCCTATTTCCCATGATTCCTTCATATT
TGCATATACGATACAAGGCTGTTAGAGAGATAATTGGAATTAATTTGACTGTAAACACAAAGATATTAGTACAAAA
TACGTGACGTAGAAAGTAATAATTTCTTGGGTAGTTTGCAGTTTTAAAATTATGTTTTAAAATGGACTATCATATGC
TTACCGTAACTTGAAAGTATTTCGATTTCTTGGCTTTATATATCTTGTGGAAAGGACGAAAcaccAGGGGCCTCTAG
AAGGATCCCgTTTTAGTACTCTGGAAACAGAATCTACTAAAACAAGGCAAAATGCCGTGTTTATCTCGTCAACTTG
TTGGCGAGATTTTTGCGGCCGCAGGAACCCCTAGTGATGGAGTTGGCCACTCCCTCTCTGCGCGCTCGCTCGC
TCACTGAGGCCGGGCGACCAAAGGTCGCCCGACGCCCGGGCTTTGCCCGGGCGGCCTCAGTGAGCGAGCGA
GCGCGCAGCTGCCTGCAGGGGCGCCTGATGCGGTATTTTCTCCTTACGCATCTGTGCGGTATTTCACACCGCAT
ACGTCAAAGCAACCATAGTACGCGCCCTGTAGCGGCGCATTAAGCGCGGCGGGTGTGGTGGTTACGCGCAGC
GTGACCGCTACACTTGCCAGCGCCTTAGCGCCCGCTCCTTTCGCTTTCTTCCCTTCCTTTCTCGCCACGTTCGC
CGGCTTTCCCCGTCAAGCTCTAAATCGGGGGCTCCCTTTAGGGTTCCGATTTAGTGCTTTACGGCACCTCGACC
CCAAAAAACTTGATTTGGGTGATGGTTCACGTAGTGGGCCATCGCCCTGATAGACGGTTTTTCGCCCTTTGACGT
TGGAGTCCACGTTCTTTAATAGTGGACTCTTGTTCCAAACTGGAACAACACTCAACTCTATCTCGGGCTATTCTTT
TGATTTATAAGGGATTTTGCCGATTTCGGTCTATTGGTTAAAAAATGAGCTGATTTAACAAAAATTTAACGCGAATT
TTAACAAAATATTAACGTTTACAATTTTATGGTGCACTCTCAGTACAATCTGCTCTGATGCCGCATAGTTAAGCCA
GCCCCGACACCCGCCAACACCCGCTGACGCGCCCTGACGGGCTTGTCTGCTCCCGGCATCCGCTTACAGACAA
GCTGTGACCGTCTCCGGGAGCTGCATGTGTCAGAGGTTTTCACCGTCATCACCGAAACGCGCGAGACGAAAGG
GCCTCGTGATACGCCTATTTTTATAGGTTAATGTCATGATAATAATGGTTTCTTAGACGTCAGGTGGCACTTTTCG
GGGAAATGTGCGCGGAACCCCTATTTGTTTATTTTTCTAAATACATTCAAATATGTATCCGCTCATGAGACAATAA
CCCTGATAAATGCTTCAATAATATTGAAAAAGGAAGAGTATGAGTATTCAACATTTCCGTGTCGCCCTTATTCCCT
TTTTTGCGGCATTTTGCCTTCCTGTTTTTGCTCACCCAGAAACGCTGGTGAAAGTAAAAGATGCTGAAGATCAGTT
GGGTGCACGAGTGGGTTACATCGAACTGGATCTCAACAGCGGTAAGATCCTTGAGAGTTTTCGCCCCGAAGAAC
GTTTTCCAATGATGAGCACTTTTAAAGTTCTGCTATGTGGCGCGGTATTATCCCGTATTGACGCCGGGCAAGAGC
AACTCGGTCGCCGCATACACTATTCTCAGAATGACTTGGTTGAGTACTCACCAGTCACAGAAAAGCATCTTACGG
ATGGCATGACAGTAAGAGAATTATGCAGTGCTGCCATAACCATGAGTGATAACACTGCGGCCAACTTACTTCTGA
CAACGATCGGAGGACCGAAGGAGCTAACCGCTTTTTTGCACAACATGGGGGATCATGTAACTCGCCTTGATCGT
TGGGAACCGGAGCTGAATGAAGCCATACCAAACGACGAGCGTGACACCACGATGCCTGTAGCAATGGCAACAA
CGTTGCGCAAACTATTAACTGGCGAACTACTTACTCTAGCTTCCCGGCAACAATTAATAGACTGGATGGAGGCG
GATAAAGTTGCAGGACCACTTCTGCGCTCGGCCCTTCCGGCTGGCTGGTTTATTGCTGATAAATCTGGAGCCGG
TGAGCGTGGAAGCCGCGGTATCATTGCAGCACTGGGGCCAGATGGTAAGCCCTCCCGTATCGTAGTTATCTACA
CGACGGGGAGTCAGGCAACTATGGATGAACGAAATAGACAGATCGCTGAGATAGGTGCCTCACTGATTAAGCAT
TGGTAACTGTCAGACCAAGTTTACTCATATATACTTTAGATTGATTTAAAACTTCATTTTTAATTTAAAAGGATCTAG
GTGAAGATCCTTTTTGATAATCTCATGACCAAAATCCCTTAACGTGAGTTTTCGTTCCACTGAGCGTCAGACCCC
GTAGAAAAGATCAAAGGATCTTCTTGAGATCCTTTTTTTCTGCGCGTAATCTGCTGCTTGCAAACAAAAAAACCAC
CGCTACCAGCGGTGGTTTGTTTGCCGGATCAAGAGCTACCAACTCTTTTTCCGAAGGTAACTGGCTTCAGCAGA
GCGCAGATACCAAATACTGTTCTTCTAGTGTAGCCGTAGTTAGGCCACCACTTCAAGAACTCTGTAGCACCGCCT
ACATACCTCGCTCTGCTAATCCTGTTACCAGTGGCTGCTGCCAGTGGCGATAAGTCGTGTCTTACCGGGTTGGA
CTCAAGACGATAGTTACCGGATAAGGCGCAGCGGTCGGGCTGAACGGGGGGTTCGTGCACACAGCCCAGCTTG
GAGCGAACGACCTACACCGAACTGAGATACCTACAGCGTGAGCTATGAGAAAGCGCCACGCTTCCCGAAGGGA
GAAAGGCGGACAGGTATCCGGTAAGCGGCAGGGTCGGAACAGGAGAGCGCACGAGGGAGCTTCCAGGGGGA
AACGCCTGGTATCTTTATAGTCCTGTCGGGTTTCGCCACCTCTGACTTGAGCGTCGATTTTTGTGATGCTCGTCA
GGGGGGCGGAGCCTATGGAAAAACGCCAGCAACGCGGCCTTTTTACGGTTCCTGGCCTTTTGCTGGCCTTTTG
CTCACATGT
pAAV-CMV-sadCas9-U6gRNA(Kcna1-sa_sgRNA5) used in in vitro qPCR experiments (SEQ ID NO: 60)
CCTGCAGGCAGCTGCGCGCTCGCTCGCTCACTGAGGCCGCCCGGGCGTCGGGCGACCTTTGGTCGCCCGGCC
TCAGTGAGCGAGCGAGCGCGCAGAGAGGGAGTGGCCAACTCCATCACTAGGGGTTCCTGCGGCCTCTAGACTC
GAGGCGTTGACATTGATTATTGACTAGTTATTAATAGTAATCAATTACGGGGTCATTAGTTCATAGCCCATATATG
GAGTTCCGCGTTACATAACTTACGGTAAATGGCCCGCCTGGCTGACCGCCCAACGACCCCCGCCCATTGACGT
CAATAATGACGTATGTTCCCATAGTAACGCCAATAGGGACTTTCCATTGACGTCAATGGGTGGAGTATTTACGGT
AAACTGCCCACTTGGCAGTACATCAAGTGTATCATATGCCAAGTACGCCCCCTATTGACGTCAATGACGGTAAAT
GGCCCGCCTGGCATTATGCCCAGTACATGACCTTATGGGACTTTCCTACTTGGCAGTACATCTACGTATTAGTCA
TCGCTATTACCATGGTGATGCGGTTTTGGCAGTACATCAATGGGCGTGGATAGCGGTTTGACTCACGGGGATTT
CCAAGTCTCCACCCCATTGACGTCAATGGGAGTTTGTTTTGGCACCAAAATCAACGGGACTTTCCAAAATGTCGT
AACAACTCCGCCCCATTGACGCAAATGGGCGGTAGGCGTGTACGGTGGGAGGTCTATATAAGCAGAGCTCTCT
GGCTAACTACCGGTGCCACCATGGCCCCAAAGAAGAAGCGGAAGGTCGGTATCCACGGAGTCCCAGCAGCCAA
GCGGAACTACATCCTGGGCCTGGCCATCGGCATCACCAGCGTGGGCTACGGCATCATCGACTACGAGACACGG
GACGTGATCGATGCCGGCGTGCGGCTGTTCAAAGAGGCCAACGTGGAAAACAACGAGGGCAGGCGGAGCAAG
AGAGGCGCCAGAAGGCTGAAGCGGCGGAGGCGGCATAGAATCCAGAGAGTGAAGAAGCTGCTGTTCGACTAC
AACCTGCTGACCGACCACAGCGAGCTGAGCGGCATCAACCCCTACGAGGCCAGAGTGAAGGGCCTGAGCCAG
AAGCTGAGCGAGGAAGAGTTCTCTGCCGCCCTGCTGCACCTGGCCAAGAGAAGAGGCGTGCACAACGTGAACG
AGGTGGAAGAGGACACCGGCAACGAGCTGTCCACCAAAGAGCAGATCAGCCGGAACAGCAAGGCCCTGGAAG
AGAAATACGTGGCCGAACTGCAGCTGGAACGGCTGAAGAAAGACGGCGAAGTGCGGGGCAGCATCAACAGATT
CAAGACCAGCGACTACGTGAAAGAAGCCAAACAGCTGCTGAAGGTGCAGAAGGCCTACCACCAGCTGGACCAG
AGCTTCATCGACACCTACATCGACCTGCTGGAAACCCGGCGGACCTACTATGAGGGACCTGGCGAGGGCAGCC
CCTTCGGCTGGAAGGACATCAAAGAATGGTACGAGATGCTGATGGGCCACTGCACCTACTTCCCCGAGGAACT
GCGGAGCGTGAAGTACGCCTACAACGCCGACCTGTACAACGCCCTGAACGACCTGAACAATCTCGTGATCACC
AGGGACGAGAACGAGAAGCTGGAATATTACGAGAAGTTCCAGATCATCGAGAACGTGTTCAAGCAGAAGAAGAA
GCCCACCCTGAAGCAGATCGCCAAAGAAATCCTCGTGAACGAAGAGGATATTAAGGGCTACAGAGTGACCAGCA
CCGGCAAGCCCGAGTTCACCAACCTGAAGGTGTACCACGACATCAAGGACATTACCGCCCGGAAAGAGATTATT
GAGAACGCCGAGCTGCTGGATCAGATTGCCAAGATCCTGACCATCTACCAGAGCAGCGAGGACATCCAGGAAG
AACTGACCAATCTGAACTCCGAGCTGACCCAGGAAGAGATCGAGCAGATCTCTAATCTGAAGGGCTATACCGGC
ACCCACAACCTGAGCCTGAAGGCCATCAACCTGATCCTGGACGAGCTGTGGCACACCAACGACAACCAGATCG
CTATCTTCAACCGGCTGAAGCTGGTGCCCAAGAAGGTGGACCTGTCCCAGCAGAAAGAGATCCCCACCACCCT
GGTGGACGACTTCATCCTGAGCCCCGTCGTGAAGAGAAGCTTCATCCAGAGCATCAAAGTGATCAACGCCATCA
TCAAGAAGTACGGCCTGCCCAACGACATCATTATCGAGCTGGCCCGCGAGAAGAACTCCAAGGACGCCCAGAA
AATGATCAACGAGATGCAGAAGCGGAACCGGCAGACCAACGAGCGGATCGAGGAAATCATCCGGACCACCGGC
AAAGAGAACGCCAAGTACCTGATCGAGAAGATCAAGCTGCACGACATGCAGGAAGGCAAGTGCCTGTACAGCC
TGGAAGCCATCCCTCTGGAAGATCTGCTGAACAACCCCTTCAACTATGAGGTGGACCACATCATCCCCAGAAGC
GTGTCCTTCGACAACAGCTTCAACAACAAGGTGCTCGTGAAGCAGGAAGAAGCCAGCAAGAAGGGCAACCGGA
CCCCATTCCAGTACCTGAGCAGCAGCGACAGCAAGATCAGCTACGAAACCTTCAAGAAGCACATCCTGAATCTG
GCCAAGGGCAAGGGCAGAATCAGCAAGACCAAGAAAGAGTATCTGCTGGAAGAACGGGACATCAACAGGTTCT
CCGTGCAGAAAGACTTCATCAACCGGAACCTGGTGGATACCAGATACGCCACCAGAGGCCTGATGAACCTGCT
GCGGAGCTACTTCAGAGTGAACAACCTGGACGTGAAAGTGAAGTCCATCAATGGCGGCTTCACCAGCTTTCTGC
GGCGGAAGTGGAAGTTTAAGAAAGAGCGGAACAAGGGGTACAAGCACCACGCCGAGGACGCCCTGATCATTGC
CAACGCCGATTTCATCTTCAAAGAGTGGAAGAAACTGGACAAGGCCAAAAAAGTGATGGAAAACCAGATGTTCG
AGGAAAAGCAGGCCGAGAGCATGCCCGAGATCGAAACCGAGCAGGAGTACAAAGAGATCTTCATCACCCCCCA
CCAGATCAAGCACATTAAGGACTTCAAGGACTACAAGTACAGCCACCGGGTGGACAAGAAGCCTAATAGAGAGC
TGATTAACGACACCCTGTACTCCACCCGGAAGGACGACAAGGGCAACACCCTGATCGTGAACAATCTGAACGGC
CTGTACGACAAGGACAATGACAAGCTGAAAAAGCTGATCAACAAGAGCCCCGAAAAGCTGCTGATGTACCACCA
CGACCCCCAGACCTACCAGAAACTGAAGCTGATTATGGAACAGTACGGCGACGAGAAGAATCCCCTGTACAAGT
ACTACGAGGAAACCGGGAACTACCTGACCAAGTACTCCAAAAAGGACAACGGCCCCGTGATCAAGAAGATTAAG
TATTACGGCAACAAACTGAACGCCCATCTGGACATCACCGACGACTACCCCAACAGCAGAAACAAGGTCGTGAA
GCTGTCCCTGAAGCCCTACAGATTCGACGTGTACCTGGACAATGGCGTGTACAAGTTCGTGACCGTGAAGAATC
TGGATGTGATCAAAAAAGAAAACTACTACGAAGTGAATAGCAAGTGCTATGAGGAAGCTAAGAAGCTGAAGAAGA
TCAGCAACCAGGCCGAGTTTATCGCCTCCTTCTACAACAACGATCTGATCAAGATCAACGGCGAGCTGTATAGA
GTGATCGGCGTGAACAACGACCTGCTGAACCGGATCGAAGTGAACATGATCGACATCACCTACCGCGAGTACCT
GGAAAACATGAACGACAAGAGGCCCCCCAGGATCATTAAGACAATCGCCTCCAAGACCCAGAGCATTAAGAAGT
ACAGCACAGACATTCTGGGCAACCTGTATGAAGTGAAATCTAAGAAGCACCCTCAGATCATCAAAAAGGGCAAAA
GGCCGGCGGCCACGAAAAAGGCCGGCCAGGCAAAAAAGAAAAAGGGATCCGGACGGGCTGACGCATTGGACG
ATTTTGATCTGGATATGCTGGGAAGTGACGCCCTCGATGATTTTGACCTTGACATGCTTGGTTCGGATGCCCTTG
ATGACTTTGACCTCGACATGCTCGGCAGTGACGCCCTTGATGATTTCGACCTGGACATGCTGATTAACTGTACAG
GCAGTGGAGAGGGCAGAGGAAGTCTGCTAACATGCGGTGACGTCGAGGAGAATCCTGGCCCAATGGCCAAGC
CTTTGTCTCAAGAAGAATCCACCCTCATTGAAAGAGCAACGGCTACAATCAACAGCATCCCCATCTCTGAAGACT
ACAGCGTCGCCAGCGCAGCTCTCTCTAGCGACGGCCGCATCTTCACTGGTGTCAATGTATATCATTTTACTGGG
GGACCTTGTGCAGAACTCGTGGTGCTGGGCACTGCTGCTGCTGCGGCAGCTGGCAACCTGACTTGTATCGTCG
CGATCGGAAATGAGAACAGGGGCATCTTGAGCCCCTGCGGACGGTGCCGACAGGTGCTTCTCGATCTGCATCC
TGGGATCAAAGCCATAGTGAAGGACAGTGATGGACAGCCGACGGCAGTTGGGATTCGTGAATTGCTGCCCTCT
GGTTATGTGTGGGAGGGCTAAGAATTCCTAGAGCTCGCTGATCAGCCTCGACTGTGCCTTCTAGTTGCCAGCCA
TCTGTTGTTTGCCCCTCCCCCGTGCCTTCCTTGACCCTGGAAGGTGCCACTCCCACTGTCCTTTCCTAATAAAAT
GAGGAAATTGCATCGCATTGTCTGAGTAGGTGTCATTCTATTCTGGGGGGTGGGGTGGGGCAGGACAGCAAGG
GGGAGGATTGGGAAGAGAATAGCAGGCATGCTGGGGAGGTACCGAGGGCCTATTTCCCATGATTCCTTCATATT
TGCATATACGATACAAGGCTGTTAGAGAGATAATTGGAATTAATTTGACTGTAAACACAAAGATATTAGTACAAAA
TACGTGACGTAGAAAGTAATAATTTCTTGGGTAGTTTGCAGTTTTAAAATTATGTTTTAAAATGGACTATCATATGC
TTACCGTAACTTGAAAGTATTTCGATTTCTTGGCTTTATATATCTTGTGGAAAGGACGAAAcaccTTGATTAAAGAG
GTTGGTGGTgTTTTAGTACTCTGGAAACAGAATCTACTAAAACAAGGCAAAATGCCGTGTTTATCTCGTCAACTTG
TTGGCGAGATTTTTGCGGCCGCAGGAACCCCTAGTGATGGAGTTGGCCACTCCCTCTCTGCGCGCTCGCTCGC
TCACTGAGGCCGGGCGACCAAAGGTCGCCCGACGCCCGGGCTTTGCCCGGGCGGCCTCAGTGAGCGAGCGA
GCGCGCAGCTGCCTGCAGGGGCGCCTGATGCGGTATTTTCTCCTTACGCATCTGTGCGGTATTTCACACCGCAT
ACGTCAAAGCAACCATAGTACGCGCCCTGTAGCGGCGCATTAAGCGCGGCGGGTGTGGTGGTTACGCGCAGC
GTGACCGCTACACTTGCCAGCGCCTTAGCGCCCGCTCCTTTCGCTTTCTTCCCTTCCTTTCTCGCCACGTTCGC
CGGCTTTCCCCGTCAAGCTCTAAATCGGGGGCTCCCTTTAGGGTTCCGATTTAGTGCTTTACGGCACCTCGACC
CCAAAAAACTTGATTTGGGTGATGGTTCACGTAGTGGGCCATCGCCCTGATAGACGGTTTTTCGCCCTTTGACGT
TGGAGTCCACGTTCTTTAATAGTGGACTCTTGTTCCAAACTGGAACAACACTCAACTCTATCTCGGGCTATTCTTT
TGATTTATAAGGGATTTTGCCGATTTCGGTCTATTGGTTAAAAAATGAGCTGATTTAACAAAAATTTAACGCGAATT
TTAACAAAATATTAACGTTTACAATTTTATGGTGCACTCTCAGTACAATCTGCTCTGATGCCGCATAGTTAAGCCA
GCCCCGACACCCGCCAACACCCGCTGACGCGCCCTGACGGGCTTGTCTGCTCCCGGCATCCGCTTACAGACAA
GCTGTGACCGTCTCCGGGAGCTGCATGTGTCAGAGGTTTTCACCGTCATCACCGAAACGCGCGAGACGAAAGG
GCCTCGTGATACGCCTATTTTTATAGGTTAATGTCATGATAATAATGGTTTCTTAGACGTCAGGTGGCACTTTTCG
GGGAAATGTGCGCGGAACCCCTATTTGTTTATTTTTCTAAATACATTCAAATATGTATCCGCTCATGAGACAATAA
CCCTGATAAATGCTTCAATAATATTGAAAAAGGAAGAGTATGAGTATTCAACATTTCCGTGTCGCCCTTATTCCCT
TTTTTGCGGCATTTTGCCTTCCTGTTTTTGCTCACCCAGAAACGCTGGTGAAAGTAAAAGATGCTGAAGATCAGTT
GGGTGCACGAGTGGGTTACATCGAACTGGATCTCAACAGCGGTAAGATCCTTGAGAGTTTTCGCCCCGAAGAAC
GTTTTCCAATGATGAGCACTTTTAAAGTTCTGCTATGTGGCGCGGTATTATCCCGTATTGACGCCGGGCAAGAGC
AACTCGGTCGCCGCATACACTATTCTCAGAATGACTTGGTTGAGTACTCACCAGTCACAGAAAAGCATCTTACGG
ATGGCATGACAGTAAGAGAATTATGCAGTGCTGCCATAACCATGAGTGATAACACTGCGGCCAACTTACTTCTGA
CAACGATCGGAGGACCGAAGGAGCTAACCGCTTTTTTGCACAACATGGGGGATCATGTAACTCGCCTTGATCGT
TGGGAACCGGAGCTGAATGAAGCCATACCAAACGACGAGCGTGACACCACGATGCCTGTAGCAATGGCAACAA
CGTTGCGCAAACTATTAACTGGCGAACTACTTACTCTAGCTTCCCGGCAACAATTAATAGACTGGATGGAGGCG
GATAAAGTTGCAGGACCACTTCTGCGCTCGGCCCTTCCGGCTGGCTGGTTTATTGCTGATAAATCTGGAGCCGG
TGAGCGTGGAAGCCGCGGTATCATTGCAGCACTGGGGCCAGATGGTAAGCCCTCCCGTATCGTAGTTATCTACA
CGACGGGGAGTCAGGCAACTATGGATGAACGAAATAGACAGATCGCTGAGATAGGTGCCTCACTGATTAAGCAT
TGGTAACTGTCAGACCAAGTTTACTCATATATACTTTAGATTGATTTAAAACTTCATTTTTAATTTAAAAGGATCTAG
GTGAAGATCCTTTTTGATAATCTCATGACCAAAATCCCTTAACGTGAGTTTTCGTTCCACTGAGCGTCAGACCCC
GTAGAAAAGATCAAAGGATCTTCTTGAGATCCTTTTTTTCTGCGCGTAATCTGCTGCTTGCAAACAAAAAAACCAC
CGCTACCAGCGGTGGTTTGTTTGCCGGATCAAGAGCTACCAACTCTTTTTCCGAAGGTAACTGGCTTCAGCAGA
GCGCAGATACCAAATACTGTTCTTCTAGTGTAGCCGTAGTTAGGCCACCACTTCAAGAACTCTGTAGCACCGCCT
ACATACCTCGCTCTGCTAATCCTGTTACCAGTGGCTGCTGCCAGTGGCGATAAGTCGTGTCTTACCGGGTTGGA
CTCAAGACGATAGTTACCGGATAAGGCGCAGCGGTCGGGCTGAACGGGGGGTTCGTGCACACAGCCCAGCTTG
GAGCGAACGACCTACACCGAACTGAGATACCTACAGCGTGAGCTATGAGAAAGCGCCACGCTTCCCGAAGGGA
GAAAGGCGGACAGGTATCCGGTAAGCGGCAGGGTCGGAACAGGAGAGCGCACGAGGGAGCTTCCAGGGGGA
AACGCCTGGTATCTTTATAGTCCTGTCGGGTTTCGCCACCTCTGACTTGAGCGTCGATTTTTGTGATGCTCGTCA
GGGGGGCGGAGCCTATGGAAAAACGCCAGCAACGCGGCCTTTTTACGGTTCCTGGCCTTTTGCTGGCCTTTTG
CTCACATGT
pAAV-CMV-sadCas9-U6gRNA(Kcna1-sa_sgRNA6) used in in vitro qPCR experiments (SEQ ID NO: 61)
CCTGCAGGCAGCTGCGCGCTCGCTCGCTCACTGAGGCCGCCCGGGCGTCGGGCGACCTTTGGTCGCCCGGCC
TCAGTGAGCGAGCGAGCGCGCAGAGAGGGAGTGGCCAACTCCATCACTAGGGGTTCCTGCGGCCTCTAGACTC
GAGGCGTTGACATTGATTATTGACTAGTTATTAATAGTAATCAATTACGGGGTCATTAGTTCATAGCCCATATATG
GAGTTCCGCGTTACATAACTTACGGTAAATGGCCCGCCTGGCTGACCGCCCAACGACCCCCGCCCATTGACGT
CAATAATGACGTATGTTCCCATAGTAACGCCAATAGGGACTTTCCATTGACGTCAATGGGTGGAGTATTTACGGT
AAACTGCCCACTTGGCAGTACATCAAGTGTATCATATGCCAAGTACGCCCCCTATTGACGTCAATGACGGTAAAT
GGCCCGCCTGGCATTATGCCCAGTACATGACCTTATGGGACTTTCCTACTTGGCAGTACATCTACGTATTAGTCA
TCGCTATTACCATGGTGATGCGGTTTTGGCAGTACATCAATGGGCGTGGATAGCGGTTTGACTCACGGGGATTT
CCAAGTCTCCACCCCATTGACGTCAATGGGAGTTTGTTTTGGCACCAAAATCAACGGGACTTTCCAAAATGTCGT
AACAACTCCGCCCCATTGACGCAAATGGGCGGTAGGCGTGTACGGTGGGAGGTCTATATAAGCAGAGCTCTCT
GGCTAACTACCGGTGCCACCATGGCCCCAAAGAAGAAGCGGAAGGTCGGTATCCACGGAGTCCCAGCAGCCAA
GCGGAACTACATCCTGGGCCTGGCCATCGGCATCACCAGCGTGGGCTACGGCATCATCGACTACGAGACACGG
GACGTGATCGATGCCGGCGTGCGGCTGTTCAAAGAGGCCAACGTGGAAAACAACGAGGGCAGGCGGAGCAAG
AGAGGCGCCAGAAGGCTGAAGCGGCGGAGGCGGCATAGAATCCAGAGAGTGAAGAAGCTGCTGTTCGACTAC
AACCTGCTGACCGACCACAGCGAGCTGAGCGGCATCAACCCCTACGAGGCCAGAGTGAAGGGCCTGAGCCAG
AAGCTGAGCGAGGAAGAGTTCTCTGCCGCCCTGCTGCACCTGGCCAAGAGAAGAGGCGTGCACAACGTGAACG
AGGTGGAAGAGGACACCGGCAACGAGCTGTCCACCAAAGAGCAGATCAGCCGGAACAGCAAGGCCCTGGAAG
AGAAATACGTGGCCGAACTGCAGCTGGAACGGCTGAAGAAAGACGGCGAAGTGCGGGGCAGCATCAACAGATT
CAAGACCAGCGACTACGTGAAAGAAGCCAAACAGCTGCTGAAGGTGCAGAAGGCCTACCACCAGCTGGACCAG
AGCTTCATCGACACCTACATCGACCTGCTGGAAACCCGGCGGACCTACTATGAGGGACCTGGCGAGGGCAGCC
CCTTCGGCTGGAAGGACATCAAAGAATGGTACGAGATGCTGATGGGCCACTGCACCTACTTCCCCGAGGAACT
GCGGAGCGTGAAGTACGCCTACAACGCCGACCTGTACAACGCCCTGAACGACCTGAACAATCTCGTGATCACC
AGGGACGAGAACGAGAAGCTGGAATATTACGAGAAGTTCCAGATCATCGAGAACGTGTTCAAGCAGAAGAAGAA
GCCCACCCTGAAGCAGATCGCCAAAGAAATCCTCGTGAACGAAGAGGATATTAAGGGCTACAGAGTGACCAGCA
CCGGCAAGCCCGAGTTCACCAACCTGAAGGTGTACCACGACATCAAGGACATTACCGCCCGGAAAGAGATTATT
GAGAACGCCGAGCTGCTGGATCAGATTGCCAAGATCCTGACCATCTACCAGAGCAGCGAGGACATCCAGGAAG
AACTGACCAATCTGAACTCCGAGCTGACCCAGGAAGAGATCGAGCAGATCTCTAATCTGAAGGGCTATACCGGC
ACCCACAACCTGAGCCTGAAGGCCATCAACCTGATCCTGGACGAGCTGTGGCACACCAACGACAACCAGATCG
CTATCTTCAACCGGCTGAAGCTGGTGCCCAAGAAGGTGGACCTGTCCCAGCAGAAAGAGATCCCCACCACCCT
GGTGGACGACTTCATCCTGAGCCCCGTCGTGAAGAGAAGCTTCATCCAGAGCATCAAAGTGATCAACGCCATCA
TCAAGAAGTACGGCCTGCCCAACGACATCATTATCGAGCTGGCCCGCGAGAAGAACTCCAAGGACGCCCAGAA
AATGATCAACGAGATGCAGAAGCGGAACCGGCAGACCAACGAGCGGATCGAGGAAATCATCCGGACCACCGGC
AAAGAGAACGCCAAGTACCTGATCGAGAAGATCAAGCTGCACGACATGCAGGAAGGCAAGTGCCTGTACAGCC
TGGAAGCCATCCCTCTGGAAGATCTGCTGAACAACCCCTTCAACTATGAGGTGGACCACATCATCCCCAGAAGC
GTGTCCTTCGACAACAGCTTCAACAACAAGGTGCTCGTGAAGCAGGAAGAAGCCAGCAAGAAGGGCAACCGGA
CCCCATTCCAGTACCTGAGCAGCAGCGACAGCAAGATCAGCTACGAAACCTTCAAGAAGCACATCCTGAATCTG
GCCAAGGGCAAGGGCAGAATCAGCAAGACCAAGAAAGAGTATCTGCTGGAAGAACGGGACATCAACAGGTTCT
CCGTGCAGAAAGACTTCATCAACCGGAACCTGGTGGATACCAGATACGCCACCAGAGGCCTGATGAACCTGCT
GCGGAGCTACTTCAGAGTGAACAACCTGGACGTGAAAGTGAAGTCCATCAATGGCGGCTTCACCAGCTTTCTGC
GGCGGAAGTGGAAGTTTAAGAAAGAGCGGAACAAGGGGTACAAGCACCACGCCGAGGACGCCCTGATCATTGC
CAACGCCGATTTCATCTTCAAAGAGTGGAAGAAACTGGACAAGGCCAAAAAAGTGATGGAAAACCAGATGTTCG
AGGAAAAGCAGGCCGAGAGCATGCCCGAGATCGAAACCGAGCAGGAGTACAAAGAGATCTTCATCACCCCCCA
CCAGATCAAGCACATTAAGGACTTCAAGGACTACAAGTACAGCCACCGGGTGGACAAGAAGCCTAATAGAGAGC
TGATTAACGACACCCTGTACTCCACCCGGAAGGACGACAAGGGCAACACCCTGATCGTGAACAATCTGAACGGC
CTGTACGACAAGGACAATGACAAGCTGAAAAAGCTGATCAACAAGAGCCCCGAAAAGCTGCTGATGTACCACCA
CGACCCCCAGACCTACCAGAAACTGAAGCTGATTATGGAACAGTACGGCGACGAGAAGAATCCCCTGTACAAGT
ACTACGAGGAAACCGGGAACTACCTGACCAAGTACTCCAAAAAGGACAACGGCCCCGTGATCAAGAAGATTAAG
TATTACGGCAACAAACTGAACGCCCATCTGGACATCACCGACGACTACCCCAACAGCAGAAACAAGGTCGTGAA
GCTGTCCCTGAAGCCCTACAGATTCGACGTGTACCTGGACAATGGCGTGTACAAGTTCGTGACCGTGAAGAATC
TGGATGTGATCAAAAAAGAAAACTACTACGAAGTGAATAGCAAGTGCTATGAGGAAGCTAAGAAGCTGAAGAAGA
TCAGCAACCAGGCCGAGTTTATCGCCTCCTTCTACAACAACGATCTGATCAAGATCAACGGCGAGCTGTATAGA
GTGATCGGCGTGAACAACGACCTGCTGAACCGGATCGAAGTGAACATGATCGACATCACCTACCGCGAGTACCT
GGAAAACATGAACGACAAGAGGCCCCCCAGGATCATTAAGACAATCGCCTCCAAGACCCAGAGCATTAAGAAGT
ACAGCACAGACATTCTGGGCAACCTGTATGAAGTGAAATCTAAGAAGCACCCTCAGATCATCAAAAAGGGCAAAA
GGCCGGCGGCCACGAAAAAGGCCGGCCAGGCAAAAAAGAAAAAGGGATCCGGACGGGCTGACGCATTGGACG
ATTTTGATCTGGATATGCTGGGAAGTGACGCCCTCGATGATTTTGACCTTGACATGCTTGGTTCGGATGCCCTTG
ATGACTTTGACCTCGACATGCTCGGCAGTGACGCCCTTGATGATTTCGACCTGGACATGCTGATTAACTGTACAG
GCAGTGGAGAGGGCAGAGGAAGTCTGCTAACATGCGGTGACGTCGAGGAGAATCCTGGCCCAATGGCCAAGC
CTTTGTCTCAAGAAGAATCCACCCTCATTGAAAGAGCAACGGCTACAATCAACAGCATCCCCATCTCTGAAGACT
ACAGCGTCGCCAGCGCAGCTCTCTCTAGCGACGGCCGCATCTTCACTGGTGTCAATGTATATCATTTTACTGGG
GGACCTTGTGCAGAACTCGTGGTGCTGGGCACTGCTGCTGCTGCGGCAGCTGGCAACCTGACTTGTATCGTCG
CGATCGGAAATGAGAACAGGGGCATCTTGAGCCCCTGCGGACGGTGCCGACAGGTGCTTCTCGATCTGCATCC
TGGGATCAAAGCCATAGTGAAGGACAGTGATGGACAGCCGACGGCAGTTGGGATTCGTGAATTGCTGCCCTCT
GGTTATGTGTGGGAGGGCTAAGAATTCCTAGAGCTCGCTGATCAGCCTCGACTGTGCCTTCTAGTTGCCAGCCA
TCTGTTGTTTGCCCCTCCCCCGTGCCTTCCTTGACCCTGGAAGGTGCCACTCCCACTGTCCTTTCCTAATAAAAT
GAGGAAATTGCATCGCATTGTCTGAGTAGGTGTCATTCTATTCTGGGGGGTGGGGTGGGGCAGGACAGCAAGG
GGGAGGATTGGGAAGAGAATAGCAGGCATGCTGGGGAGGTACCGAGGGCCTATTTCCCATGATTCCTTCATATT
TGCATATACGATACAAGGCTGTTAGAGAGATAATTGGAATTAATTTGACTGTAAACACAAAGATATTAGTACAAAA
TACGTGACGTAGAAAGTAATAATTTCTTGGGTAGTTTGCAGTTTTAAAATTATGTTTTAAAATGGACTATCATATGC
TTACCGTAACTTGAAAGTATTTCGATTTCTTGGCTTTATATATCTTGTGGAAAGGACGAAAcaccGAATTTAACTAG
CTGTATCCCgTTTTAGTACTCTGGAAACAGAATCTACTAAAACAAGGCAAAATGCCGTGTTTATCTCGTCAACTTG
TTGGCGAGATTTTTGCGGCCGCAGGAACCCCTAGTGATGGAGTTGGCCACTCCCTCTCTGCGCGCTCGCTCGC
TCACTGAGGCCGGGCGACCAAAGGTCGCCCGACGCCCGGGCTTTGCCCGGGCGGCCTCAGTGAGCGAGCGA
GCGCGCAGCTGCCTGCAGGGGCGCCTGATGCGGTATTTTCTCCTTACGCATCTGTGCGGTATTTCACACCGCAT
ACGTCAAAGCAACCATAGTACGCGCCCTGTAGCGGCGCATTAAGCGCGGCGGGTGTGGTGGTTACGCGCAGC
GTGACCGCTACACTTGCCAGCGCCTTAGCGCCCGCTCCTTTCGCTTTCTTCCCTTCCTTTCTCGCCACGTTCGC
CGGCTTTCCCCGTCAAGCTCTAAATCGGGGGCTCCCTTTAGGGTTCCGATTTAGTGCTTTACGGCACCTCGACC
CCAAAAAACTTGATTTGGGTGATGGTTCACGTAGTGGGCCATCGCCCTGATAGACGGTTTTTCGCCCTTTGACGT
TGGAGTCCACGTTCTTTAATAGTGGACTCTTGTTCCAAACTGGAACAACACTCAACTCTATCTCGGGCTATTCTTT
TGATTTATAAGGGATTTTGCCGATTTCGGTCTATTGGTTAAAAAATGAGCTGATTTAACAAAAATTTAACGCGAATT
TTAACAAAATATTAACGTTTACAATTTTATGGTGCACTCTCAGTACAATCTGCTCTGATGCCGCATAGTTAAGCCA
GCCCCGACACCCGCCAACACCCGCTGACGCGCCCTGACGGGCTTGTCTGCTCCCGGCATCCGCTTACAGACAA
GCTGTGACCGTCTCCGGGAGCTGCATGTGTCAGAGGTTTTCACCGTCATCACCGAAACGCGCGAGACGAAAGG
GCCTCGTGATACGCCTATTTTTATAGGTTAATGTCATGATAATAATGGTTTCTTAGACGTCAGGTGGCACTTTTCG
GGGAAATGTGCGCGGAACCCCTATTTGTTTATTTTTCTAAATACATTCAAATATGTATCCGCTCATGAGACAATAA
CCCTGATAAATGCTTCAATAATATTGAAAAAGGAAGAGTATGAGTATTCAACATTTCCGTGTCGCCCTTATTCCCT
TTTTTGCGGCATTTTGCCTTCCTGTTTTTGCTCACCCAGAAACGCTGGTGAAAGTAAAAGATGCTGAAGATCAGTT
GGGTGCACGAGTGGGTTACATCGAACTGGATCTCAACAGCGGTAAGATCCTTGAGAGTTTTCGCCCCGAAGAAC
GTTTTCCAATGATGAGCACTTTTAAAGTTCTGCTATGTGGCGCGGTATTATCCCGTATTGACGCCGGGCAAGAGC
AACTCGGTCGCCGCATACACTATTCTCAGAATGACTTGGTTGAGTACTCACCAGTCACAGAAAAGCATCTTACGG
ATGGCATGACAGTAAGAGAATTATGCAGTGCTGCCATAACCATGAGTGATAACACTGCGGCCAACTTACTTCTGA
CAACGATCGGAGGACCGAAGGAGCTAACCGCTTTTTTGCACAACATGGGGGATCATGTAACTCGCCTTGATCGT
TGGGAACCGGAGCTGAATGAAGCCATACCAAACGACGAGCGTGACACCACGATGCCTGTAGCAATGGCAACAA
CGTTGCGCAAACTATTAACTGGCGAACTACTTACTCTAGCTTCCCGGCAACAATTAATAGACTGGATGGAGGCG
GATAAAGTTGCAGGACCACTTCTGCGCTCGGCCCTTCCGGCTGGCTGGTTTATTGCTGATAAATCTGGAGCCGG
TGAGCGTGGAAGCCGCGGTATCATTGCAGCACTGGGGCCAGATGGTAAGCCCTCCCGTATCGTAGTTATCTACA
CGACGGGGAGTCAGGCAACTATGGATGAACGAAATAGACAGATCGCTGAGATAGGTGCCTCACTGATTAAGCAT
TGGTAACTGTCAGACCAAGTTTACTCATATATACTTTAGATTGATTTAAAACTTCATTTTTAATTTAAAAGGATCTAG
GTGAAGATCCTTTTTGATAATCTCATGACCAAAATCCCTTAACGTGAGTTTTCGTTCCACTGAGCGTCAGACCCC
GTAGAAAAGATCAAAGGATCTTCTTGAGATCCTTTTTTTCTGCGCGTAATCTGCTGCTTGCAAACAAAAAAACCAC
CGCTACCAGCGGTGGTTTGTTTGCCGGATCAAGAGCTACCAACTCTTTTTCCGAAGGTAACTGGCTTCAGCAGA
GCGCAGATACCAAATACTGTTCTTCTAGTGTAGCCGTAGTTAGGCCACCACTTCAAGAACTCTGTAGCACCGCCT
ACATACCTCGCTCTGCTAATCCTGTTACCAGTGGCTGCTGCCAGTGGCGATAAGTCGTGTCTTACCGGGTTGGA
CTCAAGACGATAGTTACCGGATAAGGCGCAGCGGTCGGGCTGAACGGGGGGTTCGTGCACACAGCCCAGCTTG
GAGCGAACGACCTACACCGAACTGAGATACCTACAGCGTGAGCTATGAGAAAGCGCCACGCTTCCCGAAGGGA
GAAAGGCGGACAGGTATCCGGTAAGCGGCAGGGTCGGAACAGGAGAGCGCACGAGGGAGCTTCCAGGGGGA
AACGCCTGGTATCTTTATAGTCCTGTCGGGTTTCGCCACCTCTGACTTGAGCGTCGATTTTTGTGATGCTCGTCA
GGGGGGCGGAGCCTATGGAAAAACGCCAGCAACGCGGCCTTTTTACGGTTCCTGGCCTTTTGCTGGCCTTTTG
CTCACATGT
pAAV-CMV-sadCas9-U6gRNA(Kcna1-sa_sgRNA7) used in in vitro qPCR experiments (SEQ ID NO: 62)
CCTGCAGGCAGCTGCGCGCTCGCTCGCTCACTGAGGCCGCCCGGGCGTCGGGCGACCTTTGGTCGCCCGGCC
TCAGTGAGCGAGCGAGCGCGCAGAGAGGGAGTGGCCAACTCCATCACTAGGGGTTCCTGCGGCCTCTAGACTC
GAGGCGTTGACATTGATTATTGACTAGTTATTAATAGTAATCAATTACGGGGTCATTAGTTCATAGCCCATATATG
GAGTTCCGCGTTACATAACTTACGGTAAATGGCCCGCCTGGCTGACCGCCCAACGACCCCCGCCCATTGACGT
CAATAATGACGTATGTTCCCATAGTAACGCCAATAGGGACTTTCCATTGACGTCAATGGGTGGAGTATTTACGGT
AAACTGCCCACTTGGCAGTACATCAAGTGTATCATATGCCAAGTACGCCCCCTATTGACGTCAATGACGGTAAAT
GGCCCGCCTGGCATTATGCCCAGTACATGACCTTATGGGACTTTCCTACTTGGCAGTACATCTACGTATTAGTCA
TCGCTATTACCATGGTGATGCGGTTTTGGCAGTACATCAATGGGCGTGGATAGCGGTTTGACTCACGGGGATTT
CCAAGTCTCCACCCCATTGACGTCAATGGGAGTTTGTTTTGGCACCAAAATCAACGGGACTTTCCAAAATGTCGT
AACAACTCCGCCCCATTGACGCAAATGGGCGGTAGGCGTGTACGGTGGGAGGTCTATATAAGCAGAGCTCTCT
GGCTAACTACCGGTGCCACCATGGCCCCAAAGAAGAAGCGGAAGGTCGGTATCCACGGAGTCCCAGCAGCCAA
GCGGAACTACATCCTGGGCCTGGCCATCGGCATCACCAGCGTGGGCTACGGCATCATCGACTACGAGACACGG
GACGTGATCGATGCCGGCGTGCGGCTGTTCAAAGAGGCCAACGTGGAAAACAACGAGGGCAGGCGGAGCAAG
AGAGGCGCCAGAAGGCTGAAGCGGCGGAGGCGGCATAGAATCCAGAGAGTGAAGAAGCTGCTGTTCGACTAC
AACCTGCTGACCGACCACAGCGAGCTGAGCGGCATCAACCCCTACGAGGCCAGAGTGAAGGGCCTGAGCCAG
AAGCTGAGCGAGGAAGAGTTCTCTGCCGCCCTGCTGCACCTGGCCAAGAGAAGAGGCGTGCACAACGTGAACG
AGGTGGAAGAGGACACCGGCAACGAGCTGTCCACCAAAGAGCAGATCAGCCGGAACAGCAAGGCCCTGGAAG
AGAAATACGTGGCCGAACTGCAGCTGGAACGGCTGAAGAAAGACGGCGAAGTGCGGGGCAGCATCAACAGATT
CAAGACCAGCGACTACGTGAAAGAAGCCAAACAGCTGCTGAAGGTGCAGAAGGCCTACCACCAGCTGGACCAG
AGCTTCATCGACACCTACATCGACCTGCTGGAAACCCGGCGGACCTACTATGAGGGACCTGGCGAGGGCAGCC
CCTTCGGCTGGAAGGACATCAAAGAATGGTACGAGATGCTGATGGGCCACTGCACCTACTTCCCCGAGGAACT
GCGGAGCGTGAAGTACGCCTACAACGCCGACCTGTACAACGCCCTGAACGACCTGAACAATCTCGTGATCACC
AGGGACGAGAACGAGAAGCTGGAATATTACGAGAAGTTCCAGATCATCGAGAACGTGTTCAAGCAGAAGAAGAA
GCCCACCCTGAAGCAGATCGCCAAAGAAATCCTCGTGAACGAAGAGGATATTAAGGGCTACAGAGTGACCAGCA
CCGGCAAGCCCGAGTTCACCAACCTGAAGGTGTACCACGACATCAAGGACATTACCGCCCGGAAAGAGATTATT
GAGAACGCCGAGCTGCTGGATCAGATTGCCAAGATCCTGACCATCTACCAGAGCAGCGAGGACATCCAGGAAG
AACTGACCAATCTGAACTCCGAGCTGACCCAGGAAGAGATCGAGCAGATCTCTAATCTGAAGGGCTATACCGGC
ACCCACAACCTGAGCCTGAAGGCCATCAACCTGATCCTGGACGAGCTGTGGCACACCAACGACAACCAGATCG
CTATCTTCAACCGGCTGAAGCTGGTGCCCAAGAAGGTGGACCTGTCCCAGCAGAAAGAGATCCCCACCACCCT
GGTGGACGACTTCATCCTGAGCCCCGTCGTGAAGAGAAGCTTCATCCAGAGCATCAAAGTGATCAACGCCATCA
TCAAGAAGTACGGCCTGCCCAACGACATCATTATCGAGCTGGCCCGCGAGAAGAACTCCAAGGACGCCCAGAA
AATGATCAACGAGATGCAGAAGCGGAACCGGCAGACCAACGAGCGGATCGAGGAAATCATCCGGACCACCGGC
AAAGAGAACGCCAAGTACCTGATCGAGAAGATCAAGCTGCACGACATGCAGGAAGGCAAGTGCCTGTACAGCC
TGGAAGCCATCCCTCTGGAAGATCTGCTGAACAACCCCTTCAACTATGAGGTGGACCACATCATCCCCAGAAGC
GTGTCCTTCGACAACAGCTTCAACAACAAGGTGCTCGTGAAGCAGGAAGAAGCCAGCAAGAAGGGCAACCGGA
CCCCATTCCAGTACCTGAGCAGCAGCGACAGCAAGATCAGCTACGAAACCTTCAAGAAGCACATCCTGAATCTG
GCCAAGGGCAAGGGCAGAATCAGCAAGACCAAGAAAGAGTATCTGCTGGAAGAACGGGACATCAACAGGTTCT
CCGTGCAGAAAGACTTCATCAACCGGAACCTGGTGGATACCAGATACGCCACCAGAGGCCTGATGAACCTGCT
GCGGAGCTACTTCAGAGTGAACAACCTGGACGTGAAAGTGAAGTCCATCAATGGCGGCTTCACCAGCTTTCTGC
GGCGGAAGTGGAAGTTTAAGAAAGAGCGGAACAAGGGGTACAAGCACCACGCCGAGGACGCCCTGATCATTGC
CAACGCCGATTTCATCTTCAAAGAGTGGAAGAAACTGGACAAGGCCAAAAAAGTGATGGAAAACCAGATGTTCG
AGGAAAAGCAGGCCGAGAGCATGCCCGAGATCGAAACCGAGCAGGAGTACAAAGAGATCTTCATCACCCCCCA
CCAGATCAAGCACATTAAGGACTTCAAGGACTACAAGTACAGCCACCGGGTGGACAAGAAGCCTAATAGAGAGC
TGATTAACGACACCCTGTACTCCACCCGGAAGGACGACAAGGGCAACACCCTGATCGTGAACAATCTGAACGGC
CTGTACGACAAGGACAATGACAAGCTGAAAAAGCTGATCAACAAGAGCCCCGAAAAGCTGCTGATGTACCACCA
CGACCCCCAGACCTACCAGAAACTGAAGCTGATTATGGAACAGTACGGCGACGAGAAGAATCCCCTGTACAAGT
ACTACGAGGAAACCGGGAACTACCTGACCAAGTACTCCAAAAAGGACAACGGCCCCGTGATCAAGAAGATTAAG
TATTACGGCAACAAACTGAACGCCCATCTGGACATCACCGACGACTACCCCAACAGCAGAAACAAGGTCGTGAA
GCTGTCCCTGAAGCCCTACAGATTCGACGTGTACCTGGACAATGGCGTGTACAAGTTCGTGACCGTGAAGAATC
TGGATGTGATCAAAAAAGAAAACTACTACGAAGTGAATAGCAAGTGCTATGAGGAAGCTAAGAAGCTGAAGAAGA
TCAGCAACCAGGCCGAGTTTATCGCCTCCTTCTACAACAACGATCTGATCAAGATCAACGGCGAGCTGTATAGA
GTGATCGGCGTGAACAACGACCTGCTGAACCGGATCGAAGTGAACATGATCGACATCACCTACCGCGAGTACCT
GGAAAACATGAACGACAAGAGGCCCCCCAGGATCATTAAGACAATCGCCTCCAAGACCCAGAGCATTAAGAAGT
ACAGCACAGACATTCTGGGCAACCTGTATGAAGTGAAATCTAAGAAGCACCCTCAGATCATCAAAAAGGGCAAAA
GGCCGGCGGCCACGAAAAAGGCCGGCCAGGCAAAAAAGAAAAAGGGATCCGGACGGGCTGACGCATTGGACG
ATTTTGATCTGGATATGCTGGGAAGTGACGCCCTCGATGATTTTGACCTTGACATGCTTGGTTCGGATGCCCTTG
ATGACTTTGACCTCGACATGCTCGGCAGTGACGCCCTTGATGATTTCGACCTGGACATGCTGATTAACTGTACAG
GCAGTGGAGAGGGCAGAGGAAGTCTGCTAACATGCGGTGACGTCGAGGAGAATCCTGGCCCAATGGCCAAGC
CTTTGTCTCAAGAAGAATCCACCCTCATTGAAAGAGCAACGGCTACAATCAACAGCATCCCCATCTCTGAAGACT
ACAGCGTCGCCAGCGCAGCTCTCTCTAGCGACGGCCGCATCTTCACTGGTGTCAATGTATATCATTTTACTGGG
GGACCTTGTGCAGAACTCGTGGTGCTGGGCACTGCTGCTGCTGCGGCAGCTGGCAACCTGACTTGTATCGTCG
CGATCGGAAATGAGAACAGGGGCATCTTGAGCCCCTGCGGACGGTGCCGACAGGTGCTTCTCGATCTGCATCC
TGGGATCAAAGCCATAGTGAAGGACAGTGATGGACAGCCGACGGCAGTTGGGATTCGTGAATTGCTGCCCTCT
GGTTATGTGTGGGAGGGCTAAGAATTCCTAGAGCTCGCTGATCAGCCTCGACTGTGCCTTCTAGTTGCCAGCCA
TCTGTTGTTTGCCCCTCCCCCGTGCCTTCCTTGACCCTGGAAGGTGCCACTCCCACTGTCCTTTCCTAATAAAAT
GAGGAAATTGCATCGCATTGTCTGAGTAGGTGTCATTCTATTCTGGGGGGTGGGGTGGGGCAGGACAGCAAGG
GGGAGGATTGGGAAGAGAATAGCAGGCATGCTGGGGAGGTACCGAGGGCCTATTTCCCATGATTCCTTCATATT
TGCATATACGATACAAGGCTGTTAGAGAGATAATTGGAATTAATTTGACTGTAAACACAAAGATATTAGTACAAAA
TACGTGACGTAGAAAGTAATAATTTCTTGGGTAGTTTGCAGTTTTAAAATTATGTTTTAAAATGGACTATCATATGC
TTACCGTAACTTGAAAGTATTTCGATTTCTTGGCTTTATATATCTTGTGGAAAGGACGAAAcaccTACTAGCCACAA
TAGAGCCAGgTTTTAGTACTCTGGAAACAGAATCTACTAAAACAAGGCAAAATGCCGTGTTTATCTCGTCAACTTG
TTGGCGAGATTTTTGCGGCCGCAGGAACCCCTAGTGATGGAGTTGGCCACTCCCTCTCTGCGCGCTCGCTCGC
TCACTGAGGCCGGGCGACCAAAGGTCGCCCGACGCCCGGGCTTTGCCCGGGCGGCCTCAGTGAGCGAGCGA
GCGCGCAGCTGCCTGCAGGGGCGCCTGATGCGGTATTTTCTCCTTACGCATCTGTGCGGTATTTCACACCGCAT
ACGTCAAAGCAACCATAGTACGCGCCCTGTAGCGGCGCATTAAGCGCGGCGGGTGTGGTGGTTACGCGCAGC
GTGACCGCTACACTTGCCAGCGCCTTAGCGCCCGCTCCTTTCGCTTTCTTCCCTTCCTTTCTCGCCACGTTCGC
CGGCTTTCCCCGTCAAGCTCTAAATCGGGGGCTCCCTTTAGGGTTCCGATTTAGTGCTTTACGGCACCTCGACC
CCAAAAAACTTGATTTGGGTGATGGTTCACGTAGTGGGCCATCGCCCTGATAGACGGTTTTTCGCCCTTTGACGT
TGGAGTCCACGTTCTTTAATAGTGGACTCTTGTTCCAAACTGGAACAACACTCAACTCTATCTCGGGCTATTCTTT
TGATTTATAAGGGATTTTGCCGATTTCGGTCTATTGGTTAAAAAATGAGCTGATTTAACAAAAATTTAACGCGAATT
TTAACAAAATATTAACGTTTACAATTTTATGGTGCACTCTCAGTACAATCTGCTCTGATGCCGCATAGTTAAGCCA
GCCCCGACACCCGCCAACACCCGCTGACGCGCCCTGACGGGCTTGTCTGCTCCCGGCATCCGCTTACAGACAA
GCTGTGACCGTCTCCGGGAGCTGCATGTGTCAGAGGTTTTCACCGTCATCACCGAAACGCGCGAGACGAAAGG
GCCTCGTGATACGCCTATTTTTATAGGTTAATGTCATGATAATAATGGTTTCTTAGACGTCAGGTGGCACTTTTCG
GGGAAATGTGCGCGGAACCCCTATTTGTTTATTTTTCTAAATACATTCAAATATGTATCCGCTCATGAGACAATAA
CCCTGATAAATGCTTCAATAATATTGAAAAAGGAAGAGTATGAGTATTCAACATTTCCGTGTCGCCCTTATTCCCT
TTTTTGCGGCATTTTGCCTTCCTGTTTTTGCTCACCCAGAAACGCTGGTGAAAGTAAAAGATGCTGAAGATCAGTT
GGGTGCACGAGTGGGTTACATCGAACTGGATCTCAACAGCGGTAAGATCCTTGAGAGTTTTCGCCCCGAAGAAC
GTTTTCCAATGATGAGCACTTTTAAAGTTCTGCTATGTGGCGCGGTATTATCCCGTATTGACGCCGGGCAAGAGC
AACTCGGTCGCCGCATACACTATTCTCAGAATGACTTGGTTGAGTACTCACCAGTCACAGAAAAGCATCTTACGG
ATGGCATGACAGTAAGAGAATTATGCAGTGCTGCCATAACCATGAGTGATAACACTGCGGCCAACTTACTTCTGA
CAACGATCGGAGGACCGAAGGAGCTAACCGCTTTTTTGCACAACATGGGGGATCATGTAACTCGCCTTGATCGT
TGGGAACCGGAGCTGAATGAAGCCATACCAAACGACGAGCGTGACACCACGATGCCTGTAGCAATGGCAACAA
CGTTGCGCAAACTATTAACTGGCGAACTACTTACTCTAGCTTCCCGGCAACAATTAATAGACTGGATGGAGGCG
GATAAAGTTGCAGGACCACTTCTGCGCTCGGCCCTTCCGGCTGGCTGGTTTATTGCTGATAAATCTGGAGCCGG
TGAGCGTGGAAGCCGCGGTATCATTGCAGCACTGGGGCCAGATGGTAAGCCCTCCCGTATCGTAGTTATCTACA
CGACGGGGAGTCAGGCAACTATGGATGAACGAAATAGACAGATCGCTGAGATAGGTGCCTCACTGATTAAGCAT
TGGTAACTGTCAGACCAAGTTTACTCATATATACTTTAGATTGATTTAAAACTTCATTTTTAATTTAAAAGGATCTAG
GTGAAGATCCTTTTTGATAATCTCATGACCAAAATCCCTTAACGTGAGTTTTCGTTCCACTGAGCGTCAGACCCC
GTAGAAAAGATCAAAGGATCTTCTTGAGATCCTTTTTTTCTGCGCGTAATCTGCTGCTTGCAAACAAAAAAACCAC
CGCTACCAGCGGTGGTTTGTTTGCCGGATCAAGAGCTACCAACTCTTTTTCCGAAGGTAACTGGCTTCAGCAGA
GCGCAGATACCAAATACTGTTCTTCTAGTGTAGCCGTAGTTAGGCCACCACTTCAAGAACTCTGTAGCACCGCCT
ACATACCTCGCTCTGCTAATCCTGTTACCAGTGGCTGCTGCCAGTGGCGATAAGTCGTGTCTTACCGGGTTGGA
CTCAAGACGATAGTTACCGGATAAGGCGCAGCGGTCGGGCTGAACGGGGGGTTCGTGCACACAGCCCAGCTTG
GAGCGAACGACCTACACCGAACTGAGATACCTACAGCGTGAGCTATGAGAAAGCGCCACGCTTCCCGAAGGGA
GAAAGGCGGACAGGTATCCGGTAAGCGGCAGGGTCGGAACAGGAGAGCGCACGAGGGAGCTTCCAGGGGGA
AACGCCTGGTATCTTTATAGTCCTGTCGGGTTTCGCCACCTCTGACTTGAGCGTCGATTTTTGTGATGCTCGTCA
GGGGGGCGGAGCCTATGGAAAAACGCCAGCAACGCGGCCTTTTTACGGTTCCTGGCCTTTTGCTGGCCTTTTG
CTCACATGT
1.3 KCNA2
Nucleotide sequence of sasgRNA for mouse KCNA2; sgRNA1 (SEQ ID NO: 63)
CCGCCGCCGCCAAGCTGGCCA
Nucleotide sequence of sasgRNA for mouse KCNA2; sgRNA2 (SEQ ID NO: 64)
GCCCCAGCCGGCCCCTTTAAT
Nucleotide sequence of sasgRNA for mouse KCNA2; sgRNA3 (SEQ ID NO: 65)
CCCGCAGCGAACTCGAATTAA
pAAV-CMV-sadCas9-U6gRNA(Kcna2-sa_sgRNA1) used in in vitro qPCR experiments (SEQ ID NO: 66)
CCTGCAGGCAGCTGCGCGCTCGCTCGCTCACTGAGGCCGCCCGGGCGTCGGGCGACCTTTGGTCGCCCGGCC
TCAGTGAGCGAGCGAGCGCGCAGAGAGGGAGTGGCCAACTCCATCACTAGGGGTTCCTGCGGCCTCTAGACTC
GAGGCGTTGACATTGATTATTGACTAGTTATTAATAGTAATCAATTACGGGGTCATTAGTTCATAGCCCATATATG
GAGTTCCGCGTTACATAACTTACGGTAAATGGCCCGCCTGGCTGACCGCCCAACGACCCCCGCCCATTGACGT
CAATAATGACGTATGTTCCCATAGTAACGCCAATAGGGACTTTCCATTGACGTCAATGGGTGGAGTATTTACGGT
AAACTGCCCACTTGGCAGTACATCAAGTGTATCATATGCCAAGTACGCCCCCTATTGACGTCAATGACGGTAAAT
GGCCCGCCTGGCATTATGCCCAGTACATGACCTTATGGGACTTTCCTACTTGGCAGTACATCTACGTATTAGTCA
TCGCTATTACCATGGTGATGCGGTTTTGGCAGTACATCAATGGGCGTGGATAGCGGTTTGACTCACGGGGATTT
CCAAGTCTCCACCCCATTGACGTCAATGGGAGTTTGTTTTGGCACCAAAATCAACGGGACTTTCCAAAATGTCGT
AACAACTCCGCCCCATTGACGCAAATGGGCGGTAGGCGTGTACGGTGGGAGGTCTATATAAGCAGAGCTCTCT
GGCTAACTACCGGTGCCACCATGGCCCCAAAGAAGAAGCGGAAGGTCGGTATCCACGGAGTCCCAGCAGCCAA
GCGGAACTACATCCTGGGCCTGGCCATCGGCATCACCAGCGTGGGCTACGGCATCATCGACTACGAGACACGG
GACGTGATCGATGCCGGCGTGCGGCTGTTCAAAGAGGCCAACGTGGAAAACAACGAGGGCAGGCGGAGCAAG
AGAGGCGCCAGAAGGCTGAAGCGGCGGAGGCGGCATAGAATCCAGAGAGTGAAGAAGCTGCTGTTCGACTAC
AACCTGCTGACCGACCACAGCGAGCTGAGCGGCATCAACCCCTACGAGGCCAGAGTGAAGGGCCTGAGCCAG
AAGCTGAGCGAGGAAGAGTTCTCTGCCGCCCTGCTGCACCTGGCCAAGAGAAGAGGCGTGCACAACGTGAACG
AGGTGGAAGAGGACACCGGCAACGAGCTGTCCACCAAAGAGCAGATCAGCCGGAACAGCAAGGCCCTGGAAG
AGAAATACGTGGCCGAACTGCAGCTGGAACGGCTGAAGAAAGACGGCGAAGTGCGGGGCAGCATCAACAGATT
CAAGACCAGCGACTACGTGAAAGAAGCCAAACAGCTGCTGAAGGTGCAGAAGGCCTACCACCAGCTGGACCAG
AGCTTCATCGACACCTACATCGACCTGCTGGAAACCCGGCGGACCTACTATGAGGGACCTGGCGAGGGCAGCC
CCTTCGGCTGGAAGGACATCAAAGAATGGTACGAGATGCTGATGGGCCACTGCACCTACTTCCCCGAGGAACT
GCGGAGCGTGAAGTACGCCTACAACGCCGACCTGTACAACGCCCTGAACGACCTGAACAATCTCGTGATCACC
AGGGACGAGAACGAGAAGCTGGAATATTACGAGAAGTTCCAGATCATCGAGAACGTGTTCAAGCAGAAGAAGAA
GCCCACCCTGAAGCAGATCGCCAAAGAAATCCTCGTGAACGAAGAGGATATTAAGGGCTACAGAGTGACCAGCA
CCGGCAAGCCCGAGTTCACCAACCTGAAGGTGTACCACGACATCAAGGACATTACCGCCCGGAAAGAGATTATT
GAGAACGCCGAGCTGCTGGATCAGATTGCCAAGATCCTGACCATCTACCAGAGCAGCGAGGACATCCAGGAAG
AACTGACCAATCTGAACTCCGAGCTGACCCAGGAAGAGATCGAGCAGATCTCTAATCTGAAGGGCTATACCGGC
ACCCACAACCTGAGCCTGAAGGCCATCAACCTGATCCTGGACGAGCTGTGGCACACCAACGACAACCAGATCG
CTATCTTCAACCGGCTGAAGCTGGTGCCCAAGAAGGTGGACCTGTCCCAGCAGAAAGAGATCCCCACCACCCT
GGTGGACGACTTCATCCTGAGCCCCGTCGTGAAGAGAAGCTTCATCCAGAGCATCAAAGTGATCAACGCCATCA
TCAAGAAGTACGGCCTGCCCAACGACATCATTATCGAGCTGGCCCGCGAGAAGAACTCCAAGGACGCCCAGAA
AATGATCAACGAGATGCAGAAGCGGAACCGGCAGACCAACGAGCGGATCGAGGAAATCATCCGGACCACCGGC
AAAGAGAACGCCAAGTACCTGATCGAGAAGATCAAGCTGCACGACATGCAGGAAGGCAAGTGCCTGTACAGCC
TGGAAGCCATCCCTCTGGAAGATCTGCTGAACAACCCCTTCAACTATGAGGTGGACCACATCATCCCCAGAAGC
GTGTCCTTCGACAACAGCTTCAACAACAAGGTGCTCGTGAAGCAGGAAGAAGCCAGCAAGAAGGGCAACCGGA
CCCCATTCCAGTACCTGAGCAGCAGCGACAGCAAGATCAGCTACGAAACCTTCAAGAAGCACATCCTGAATCTG
GCCAAGGGCAAGGGCAGAATCAGCAAGACCAAGAAAGAGTATCTGCTGGAAGAACGGGACATCAACAGGTTCT
CCGTGCAGAAAGACTTCATCAACCGGAACCTGGTGGATACCAGATACGCCACCAGAGGCCTGATGAACCTGCT
GCGGAGCTACTTCAGAGTGAACAACCTGGACGTGAAAGTGAAGTCCATCAATGGCGGCTTCACCAGCTTTCTGC
GGCGGAAGTGGAAGTTTAAGAAAGAGCGGAACAAGGGGTACAAGCACCACGCCGAGGACGCCCTGATCATTGC
CAACGCCGATTTCATCTTCAAAGAGTGGAAGAAACTGGACAAGGCCAAAAAAGTGATGGAAAACCAGATGTTCG
AGGAAAAGCAGGCCGAGAGCATGCCCGAGATCGAAACCGAGCAGGAGTACAAAGAGATCTTCATCACCCCCCA
CCAGATCAAGCACATTAAGGACTTCAAGGACTACAAGTACAGCCACCGGGTGGACAAGAAGCCTAATAGAGAGC
TGATTAACGACACCCTGTACTCCACCCGGAAGGACGACAAGGGCAACACCCTGATCGTGAACAATCTGAACGGC
CTGTACGACAAGGACAATGACAAGCTGAAAAAGCTGATCAACAAGAGCCCCGAAAAGCTGCTGATGTACCACCA
CGACCCCCAGACCTACCAGAAACTGAAGCTGATTATGGAACAGTACGGCGACGAGAAGAATCCCCTGTACAAGT
ACTACGAGGAAACCGGGAACTACCTGACCAAGTACTCCAAAAAGGACAACGGCCCCGTGATCAAGAAGATTAAG
TATTACGGCAACAAACTGAACGCCCATCTGGACATCACCGACGACTACCCCAACAGCAGAAACAAGGTCGTGAA
GCTGTCCCTGAAGCCCTACAGATTCGACGTGTACCTGGACAATGGCGTGTACAAGTTCGTGACCGTGAAGAATC
TGGATGTGATCAAAAAAGAAAACTACTACGAAGTGAATAGCAAGTGCTATGAGGAAGCTAAGAAGCTGAAGAAGA
TCAGCAACCAGGCCGAGTTTATCGCCTCCTTCTACAACAACGATCTGATCAAGATCAACGGCGAGCTGTATAGA
GTGATCGGCGTGAACAACGACCTGCTGAACCGGATCGAAGTGAACATGATCGACATCACCTACCGCGAGTACCT
GGAAAACATGAACGACAAGAGGCCCCCCAGGATCATTAAGACAATCGCCTCCAAGACCCAGAGCATTAAGAAGT
ACAGCACAGACATTCTGGGCAACCTGTATGAAGTGAAATCTAAGAAGCACCCTCAGATCATCAAAAAGGGCAAAA
GGCCGGCGGCCACGAAAAAGGCCGGCCAGGCAAAAAAGAAAAAGGGATCCGGACGGGCTGACGCATTGGACG
ATTTTGATCTGGATATGCTGGGAAGTGACGCCCTCGATGATTTTGACCTTGACATGCTTGGTTCGGATGCCCTTG
ATGACTTTGACCTCGACATGCTCGGCAGTGACGCCCTTGATGATTTCGACCTGGACATGCTGATTAACTGTACAG
GCAGTGGAGAGGGCAGAGGAAGTCTGCTAACATGCGGTGACGTCGAGGAGAATCCTGGCCCAATGGCCAAGC
CTTTGTCTCAAGAAGAATCCACCCTCATTGAAAGAGCAACGGCTACAATCAACAGCATCCCCATCTCTGAAGACT
ACAGCGTCGCCAGCGCAGCTCTCTCTAGCGACGGCCGCATCTTCACTGGTGTCAATGTATATCATTTTACTGGG
GGACCTTGTGCAGAACTCGTGGTGCTGGGCACTGCTGCTGCTGCGGCAGCTGGCAACCTGACTTGTATCGTCG
CGATCGGAAATGAGAACAGGGGCATCTTGAGCCCCTGCGGACGGTGCCGACAGGTGCTTCTCGATCTGCATCC
TGGGATCAAAGCCATAGTGAAGGACAGTGATGGACAGCCGACGGCAGTTGGGATTCGTGAATTGCTGCCCTCT
GGTTATGTGTGGGAGGGCTAAGAATTCCTAGAGCTCGCTGATCAGCCTCGACTGTGCCTTCTAGTTGCCAGCCA
TCTGTTGTTTGCCCCTCCCCCGTGCCTTCCTTGACCCTGGAAGGTGCCACTCCCACTGTCCTTTCCTAATAAAAT
GAGGAAATTGCATCGCATTGTCTGAGTAGGTGTCATTCTATTCTGGGGGGTGGGGTGGGGCAGGACAGCAAGG
GGGAGGATTGGGAAGAGAATAGCAGGCATGCTGGGGAGGTACCGAGGGCCTATTTCCCATGATTCCTTCATATT
TGCATATACGATACAAGGCTGTTAGAGAGATAATTGGAATTAATTTGACTGTAAACACAAAGATATTAGTACAAAA
TACGTGACGTAGAAAGTAATAATTTCTTGGGTAGTTTGCAGTTTTAAAATTATGTTTTAAAATGGACTATCATATGC
TTACCGTAACTTGAAAGTATTTCGATTTCTTGGCTTTATATATCTTGTGGAAAGGACGAAAcaccGCCGCCGCCGC
CAAGCTGGCCAgTTTTAGTACTCTGGAAACAGAATCTACTAAAACAAGGCAAAATGCCGTGTTTATCTCGTCAACT
TGTTGGCGAGATTTTTGCGGCCGCAGGAACCCCTAGTGATGGAGTTGGCCACTCCCTCTCTGCGCGCTCGCTC
GCTCACTGAGGCCGGGCGACCAAAGGTCGCCCGACGCCCGGGCTTTGCCCGGGCGGCCTCAGTGAGCGAGC
GAGCGCGCAGCTGCCTGCAGGGGCGCCTGATGCGGTATTTTCTCCTTACGCATCTGTGCGGTATTTCACACCG
CATACGTCAAAGCAACCATAGTACGCGCCCTGTAGCGGCGCATTAAGCGCGGCGGGTGTGGTGGTTACGCGCA
GCGTGACCGCTACACTTGCCAGCGCCTTAGCGCCCGCTCCTTTCGCTTTCTTCCCTTCCTTTCTCGCCACGTTC
GCCGGCTTTCCCCGTCAAGCTCTAAATCGGGGGCTCCCTTTAGGGTTCCGATTTAGTGCTTTACGGCACCTCGA
CCCCAAAAAACTTGATTTGGGTGATGGTTCACGTAGTGGGCCATCGCCCTGATAGACGGTTTTTCGCCCTTTGAC
GTTGGAGTCCACGTTCTTTAATAGTGGACTCTTGTTCCAAACTGGAACAACACTCAACTCTATCTCGGGCTATTCT
TTTGATTTATAAGGGATTTTGCCGATTTCGGTCTATTGGTTAAAAAATGAGCTGATTTAACAAAAATTTAACGCGAA
TTTTAACAAAATATTAACGTTTACAATTTTATGGTGCACTCTCAGTACAATCTGCTCTGATGCCGCATAGTTAAGCC
AGCCCCGACACCCGCCAACACCCGCTGACGCGCCCTGACGGGCTTGTCTGCTCCCGGCATCCGCTTACAGACA
AGCTGTGACCGTCTCCGGGAGCTGCATGTGTCAGAGGTTTTCACCGTCATCACCGAAACGCGCGAGACGAAAG
GGCCTCGTGATACGCCTATTTTTATAGGTTAATGTCATGATAATAATGGTTTCTTAGACGTCAGGTGGCACTTTTC
GGGGAAATGTGCGCGGAACCCCTATTTGTTTATTTTTCTAAATACATTCAAATATGTATCCGCTCATGAGACAATA
ACCCTGATAAATGCTTCAATAATATTGAAAAAGGAAGAGTATGAGTATTCAACATTTCCGTGTCGCCCTTATTCCC
TTTTTTGCGGCATTTTGCCTTCCTGTTTTTGCTCACCCAGAAACGCTGGTGAAAGTAAAAGATGCTGAAGATCAGT
TGGGTGCACGAGTGGGTTACATCGAACTGGATCTCAACAGCGGTAAGATCCTTGAGAGTTTTCGCCCCGAAGAA
CGTTTTCCAATGATGAGCACTTTTAAAGTTCTGCTATGTGGCGCGGTATTATCCCGTATTGACGCCGGGCAAGAG
CAACTCGGTCGCCGCATACACTATTCTCAGAATGACTTGGTTGAGTACTCACCAGTCACAGAAAAGCATCTTACG
GATGGCATGACAGTAAGAGAATTATGCAGTGCTGCCATAACCATGAGTGATAACACTGCGGCCAACTTACTTCTG
ACAACGATCGGAGGACCGAAGGAGCTAACCGCTTTTTTGCACAACATGGGGGATCATGTAACTCGCCTTGATCG
TTGGGAACCGGAGCTGAATGAAGCCATACCAAACGACGAGCGTGACACCACGATGCCTGTAGCAATGGCAACA
ACGTTGCGCAAACTATTAACTGGCGAACTACTTACTCTAGCTTCCCGGCAACAATTAATAGACTGGATGGAGGCG
GATAAAGTTGCAGGACCACTTCTGCGCTCGGCCCTTCCGGCTGGCTGGTTTATTGCTGATAAATCTGGAGCCGG
TGAGCGTGGAAGCCGCGGTATCATTGCAGCACTGGGGCCAGATGGTAAGCCCTCCCGTATCGTAGTTATCTACA
CGACGGGGAGTCAGGCAACTATGGATGAACGAAATAGACAGATCGCTGAGATAGGTGCCTCACTGATTAAGCAT
TGGTAACTGTCAGACCAAGTTTACTCATATATACTTTAGATTGATTTAAAACTTCATTTTTAATTTAAAAGGATCTAG
GTGAAGATCCTTTTTGATAATCTCATGACCAAAATCCCTTAACGTGAGTTTTCGTTCCACTGAGCGTCAGACCCC
GTAGAAAAGATCAAAGGATCTTCTTGAGATCCTTTTTTTCTGCGCGTAATCTGCTGCTTGCAAACAAAAAAACCAC
CGCTACCAGCGGTGGTTTGTTTGCCGGATCAAGAGCTACCAACTCTTTTTCCGAAGGTAACTGGCTTCAGCAGA
GCGCAGATACCAAATACTGTTCTTCTAGTGTAGCCGTAGTTAGGCCACCACTTCAAGAACTCTGTAGCACCGCCT
ACATACCTCGCTCTGCTAATCCTGTTACCAGTGGCTGCTGCCAGTGGCGATAAGTCGTGTCTTACCGGGTTGGA
CTCAAGACGATAGTTACCGGATAAGGCGCAGCGGTCGGGCTGAACGGGGGGTTCGTGCACACAGCCCAGCTTG
GAGCGAACGACCTACACCGAACTGAGATACCTACAGCGTGAGCTATGAGAAAGCGCCACGCTTCCCGAAGGGA
GAAAGGCGGACAGGTATCCGGTAAGCGGCAGGGTCGGAACAGGAGAGCGCACGAGGGAGCTTCCAGGGGGA
AACGCCTGGTATCTTTATAGTCCTGTCGGGTTTCGCCACCTCTGACTTGAGCGTCGATTTTTGTGATGCTCGTCA
GGGGGGCGGAGCCTATGGAAAAACGCCAGCAACGCGGCCTTTTTACGGTTCCTGGCCTTTTGCTGGCCTTTTG
CTCACATGT
pAAV-CMV-sadCas9-U6gRNA(Kcna2-sa_sgRNA2) used in in vitro qPCR experiments (SEQ ID NO: 67)
CCTGCAGGCAGCTGCGCGCTCGCTCGCTCACTGAGGCCGCCCGGGCGTCGGGCGACCTTTGGTCGCCCGGCC
TCAGTGAGCGAGCGAGCGCGCAGAGAGGGAGTGGCCAACTCCATCACTAGGGGTTCCTGCGGCCTCTAGACTC
GAGGCGTTGACATTGATTATTGACTAGTTATTAATAGTAATCAATTACGGGGTCATTAGTTCATAGCCCATATATG
GAGTTCCGCGTTACATAACTTACGGTAAATGGCCCGCCTGGCTGACCGCCCAACGACCCCCGCCCATTGACGT
CAATAATGACGTATGTTCCCATAGTAACGCCAATAGGGACTTTCCATTGACGTCAATGGGTGGAGTATTTACGGT
AAACTGCCCACTTGGCAGTACATCAAGTGTATCATATGCCAAGTACGCCCCCTATTGACGTCAATGACGGTAAAT
GGCCCGCCTGGCATTATGCCCAGTACATGACCTTATGGGACTTTCCTACTTGGCAGTACATCTACGTATTAGTCA
TCGCTATTACCATGGTGATGCGGTTTTGGCAGTACATCAATGGGCGTGGATAGCGGTTTGACTCACGGGGATTT
CCAAGTCTCCACCCCATTGACGTCAATGGGAGTTTGTTTTGGCACCAAAATCAACGGGACTTTCCAAAATGTCGT
AACAACTCCGCCCCATTGACGCAAATGGGCGGTAGGCGTGTACGGTGGGAGGTCTATATAAGCAGAGCTCTCT
GGCTAACTACCGGTGCCACCATGGCCCCAAAGAAGAAGCGGAAGGTCGGTATCCACGGAGTCCCAGCAGCCAA
GCGGAACTACATCCTGGGCCTGGCCATCGGCATCACCAGCGTGGGCTACGGCATCATCGACTACGAGACACGG
GACGTGATCGATGCCGGCGTGCGGCTGTTCAAAGAGGCCAACGTGGAAAACAACGAGGGCAGGCGGAGCAAG
AGAGGCGCCAGAAGGCTGAAGCGGCGGAGGCGGCATAGAATCCAGAGAGTGAAGAAGCTGCTGTTCGACTAC
AACCTGCTGACCGACCACAGCGAGCTGAGCGGCATCAACCCCTACGAGGCCAGAGTGAAGGGCCTGAGCCAG
AAGCTGAGCGAGGAAGAGTTCTCTGCCGCCCTGCTGCACCTGGCCAAGAGAAGAGGCGTGCACAACGTGAACG
AGGTGGAAGAGGACACCGGCAACGAGCTGTCCACCAAAGAGCAGATCAGCCGGAACAGCAAGGCCCTGGAAG
AGAAATACGTGGCCGAACTGCAGCTGGAACGGCTGAAGAAAGACGGCGAAGTGCGGGGCAGCATCAACAGATT
CAAGACCAGCGACTACGTGAAAGAAGCCAAACAGCTGCTGAAGGTGCAGAAGGCCTACCACCAGCTGGACCAG
AGCTTCATCGACACCTACATCGACCTGCTGGAAACCCGGCGGACCTACTATGAGGGACCTGGCGAGGGCAGCC
CCTTCGGCTGGAAGGACATCAAAGAATGGTACGAGATGCTGATGGGCCACTGCACCTACTTCCCCGAGGAACT
GCGGAGCGTGAAGTACGCCTACAACGCCGACCTGTACAACGCCCTGAACGACCTGAACAATCTCGTGATCACC
AGGGACGAGAACGAGAAGCTGGAATATTACGAGAAGTTCCAGATCATCGAGAACGTGTTCAAGCAGAAGAAGAA
GCCCACCCTGAAGCAGATCGCCAAAGAAATCCTCGTGAACGAAGAGGATATTAAGGGCTACAGAGTGACCAGCA
CCGGCAAGCCCGAGTTCACCAACCTGAAGGTGTACCACGACATCAAGGACATTACCGCCCGGAAAGAGATTATT
GAGAACGCCGAGCTGCTGGATCAGATTGCCAAGATCCTGACCATCTACCAGAGCAGCGAGGACATCCAGGAAG
AACTGACCAATCTGAACTCCGAGCTGACCCAGGAAGAGATCGAGCAGATCTCTAATCTGAAGGGCTATACCGGC
ACCCACAACCTGAGCCTGAAGGCCATCAACCTGATCCTGGACGAGCTGTGGCACACCAACGACAACCAGATCG
CTATCTTCAACCGGCTGAAGCTGGTGCCCAAGAAGGTGGACCTGTCCCAGCAGAAAGAGATCCCCACCACCCT
GGTGGACGACTTCATCCTGAGCCCCGTCGTGAAGAGAAGCTTCATCCAGAGCATCAAAGTGATCAACGCCATCA
TCAAGAAGTACGGCCTGCCCAACGACATCATTATCGAGCTGGCCCGCGAGAAGAACTCCAAGGACGCCCAGAA
AATGATCAACGAGATGCAGAAGCGGAACCGGCAGACCAACGAGCGGATCGAGGAAATCATCCGGACCACCGGC
AAAGAGAACGCCAAGTACCTGATCGAGAAGATCAAGCTGCACGACATGCAGGAAGGCAAGTGCCTGTACAGCC
TGGAAGCCATCCCTCTGGAAGATCTGCTGAACAACCCCTTCAACTATGAGGTGGACCACATCATCCCCAGAAGC
GTGTCCTTCGACAACAGCTTCAACAACAAGGTGCTCGTGAAGCAGGAAGAAGCCAGCAAGAAGGGCAACCGGA
CCCCATTCCAGTACCTGAGCAGCAGCGACAGCAAGATCAGCTACGAAACCTTCAAGAAGCACATCCTGAATCTG
GCCAAGGGCAAGGGCAGAATCAGCAAGACCAAGAAAGAGTATCTGCTGGAAGAACGGGACATCAACAGGTTCT
CCGTGCAGAAAGACTTCATCAACCGGAACCTGGTGGATACCAGATACGCCACCAGAGGCCTGATGAACCTGCT
GCGGAGCTACTTCAGAGTGAACAACCTGGACGTGAAAGTGAAGTCCATCAATGGCGGCTTCACCAGCTTTCTGC
GGCGGAAGTGGAAGTTTAAGAAAGAGCGGAACAAGGGGTACAAGCACCACGCCGAGGACGCCCTGATCATTGC
CAACGCCGATTTCATCTTCAAAGAGTGGAAGAAACTGGACAAGGCCAAAAAAGTGATGGAAAACCAGATGTTCG
AGGAAAAGCAGGCCGAGAGCATGCCCGAGATCGAAACCGAGCAGGAGTACAAAGAGATCTTCATCACCCCCCA
CCAGATCAAGCACATTAAGGACTTCAAGGACTACAAGTACAGCCACCGGGTGGACAAGAAGCCTAATAGAGAGC
TGATTAACGACACCCTGTACTCCACCCGGAAGGACGACAAGGGCAACACCCTGATCGTGAACAATCTGAACGGC
CTGTACGACAAGGACAATGACAAGCTGAAAAAGCTGATCAACAAGAGCCCCGAAAAGCTGCTGATGTACCACCA
CGACCCCCAGACCTACCAGAAACTGAAGCTGATTATGGAACAGTACGGCGACGAGAAGAATCCCCTGTACAAGT
ACTACGAGGAAACCGGGAACTACCTGACCAAGTACTCCAAAAAGGACAACGGCCCCGTGATCAAGAAGATTAAG
TATTACGGCAACAAACTGAACGCCCATCTGGACATCACCGACGACTACCCCAACAGCAGAAACAAGGTCGTGAA
GCTGTCCCTGAAGCCCTACAGATTCGACGTGTACCTGGACAATGGCGTGTACAAGTTCGTGACCGTGAAGAATC
TGGATGTGATCAAAAAAGAAAACTACTACGAAGTGAATAGCAAGTGCTATGAGGAAGCTAAGAAGCTGAAGAAGA
TCAGCAACCAGGCCGAGTTTATCGCCTCCTTCTACAACAACGATCTGATCAAGATCAACGGCGAGCTGTATAGA
GTGATCGGCGTGAACAACGACCTGCTGAACCGGATCGAAGTGAACATGATCGACATCACCTACCGCGAGTACCT
GGAAAACATGAACGACAAGAGGCCCCCCAGGATCATTAAGACAATCGCCTCCAAGACCCAGAGCATTAAGAAGT
ACAGCACAGACATTCTGGGCAACCTGTATGAAGTGAAATCTAAGAAGCACCCTCAGATCATCAAAAAGGGCAAAA
GGCCGGCGGCCACGAAAAAGGCCGGCCAGGCAAAAAAGAAAAAGGGATCCGGACGGGCTGACGCATTGGACG
ATTTTGATCTGGATATGCTGGGAAGTGACGCCCTCGATGATTTTGACCTTGACATGCTTGGTTCGGATGCCCTTG
ATGACTTTGACCTCGACATGCTCGGCAGTGACGCCCTTGATGATTTCGACCTGGACATGCTGATTAACTGTACAG
GCAGTGGAGAGGGCAGAGGAAGTCTGCTAACATGCGGTGACGTCGAGGAGAATCCTGGCCCAATGGCCAAGC
CTTTGTCTCAAGAAGAATCCACCCTCATTGAAAGAGCAACGGCTACAATCAACAGCATCCCCATCTCTGAAGACT
ACAGCGTCGCCAGCGCAGCTCTCTCTAGCGACGGCCGCATCTTCACTGGTGTCAATGTATATCATTTTACTGGG
GGACCTTGTGCAGAACTCGTGGTGCTGGGCACTGCTGCTGCTGCGGCAGCTGGCAACCTGACTTGTATCGTCG
CGATCGGAAATGAGAACAGGGGCATCTTGAGCCCCTGCGGACGGTGCCGACAGGTGCTTCTCGATCTGCATCC
TGGGATCAAAGCCATAGTGAAGGACAGTGATGGACAGCCGACGGCAGTTGGGATTCGTGAATTGCTGCCCTCT
GGTTATGTGTGGGAGGGCTAAGAATTCCTAGAGCTCGCTGATCAGCCTCGACTGTGCCTTCTAGTTGCCAGCCA
TCTGTTGTTTGCCCCTCCCCCGTGCCTTCCTTGACCCTGGAAGGTGCCACTCCCACTGTCCTTTCCTAATAAAAT
GAGGAAATTGCATCGCATTGTCTGAGTAGGTGTCATTCTATTCTGGGGGGTGGGGGGGGCAGGACAGCAAGG
GGGAGGATTGGGAAGAGAATAGCAGGCATGCTGGGGAGGTACCGAGGGCCTATTTCCCATGATTCCTTCATATT
TGCATATACGATACAAGGCTGTTAGAGAGATAATTGGAATTAATTTGACTGTAAACACAAAGATATTAGTACAAAA
TACGTGACGTAGAAAGTAATAATTTCTTGGGTAGTTTGCAGTTTTAAAATTATGTTTTAAAATGGACTATCATATGC
TTACCGTAACTTGAAAGTATTTCGATTTCTTGGCTTTATATATCTTGTGGAAAGGACGAAAcaccGCCCCAGCCGG
CCCCTTTAATgTTTTAGTACTCTGGAAACAGAATCTACTAAAACAAGGCAAAATGCCGTGTTTATCTCGTCAACTT
GTTGGCGAGATTTTTGCGGCCGCAGGAACCCCTAGTGATGGAGTTGGCCACTCCCTCTCTGCGCGCTCGCTCG
CTCACTGAGGCCGGGCGACCAAAGGTCGCCCGACGCCCGGGCTTTGCCCGGGCGGCCTCAGTGAGCGAGCG
AGCGCGCAGCTGCCTGCAGGGGCGCCTGATGCGGTATTTTCTCCTTACGCATCTGTGCGGTATTTCACACCGCA
TACGTCAAAGCAACCATAGTACGCGCCCTGTAGCGGCGCATTAAGCGCGGCGGGTGTGGTGGTTACGCGCAGC
GTGACCGCTACACTTGCCAGCGCCTTAGCGCCCGCTCCTTTCGCTTTCTTCCCTTCCTTTCTCGCCACGTTCGC
CGGCTTTCCCCGTCAAGCTCTAAATCGGGGGCTCCCTTTAGGGTTCCGATTTAGTGCTTTACGGCACCTCGACC
CCAAAAAACTTGATTTGGGTGATGGTTCACGTAGTGGGCCATCGCCCTGATAGACGGTTTTTCGCCCTTTGACGT
TGGAGTCCACGTTCTTTAATAGTGGACTCTTGTTCCAAACTGGAACAACACTCAACTCTATCTCGGGCTATTCTTT
TGATTTATAAGGGATTTTGCCGATTTCGGTCTATTGGTTAAAAAATGAGCTGATTTAACAAAAATTTAACGCGAATT
TTAACAAAATATTAACGTTTACAATTTTATGGTGCACTCTCAGTACAATCTGCTCTGATGCCGCATAGTTAAGCCA
GCCCCGACACCCGCCAACACCCGCTGACGCGCCCTGACGGGCTTGTCTGCTCCCGGCATCCGCTTACAGACAA
GCTGTGACCGTCTCCGGGAGCTGCATGTGTCAGAGGTTTTCACCGTCATCACCGAAACGCGCGAGACGAAAGG
GCCTCGTGATACGCCTATTTTTATAGGTTAATGTCATGATAATAATGGTTTCTTAGACGTCAGGTGGCACTTTTCG
GGGAAATGTGCGCGGAACCCCTATTTGTTTATTTTTCTAAATACATTCAAATATGTATCCGCTCATGAGACAATAA
CCCTGATAAATGCTTCAATAATATTGAAAAAGGAAGAGTATGAGTATTCAACATTTCCGTGTCGCCCTTATTCCCT
TTTTTGCGGCATTTTGCCTTCCTGTTTTTGCTCACCCAGAAACGCTGGTGAAAGTAAAAGATGCTGAAGATCAGTT
GGGTGCACGAGTGGGTTACATCGAACTGGATCTCAACAGCGGTAAGATCCTTGAGAGTTTTCGCCCCGAAGAAC
GTTTTCCAATGATGAGCACTTTTAAAGTTCTGCTATGTGGCGCGGTATTATCCCGTATTGACGCCGGGCAAGAGC
AACTCGGTCGCCGCATACACTATTCTCAGAATGACTTGGTTGAGTACTCACCAGTCACAGAAAAGCATCTTACGG
ATGGCATGACAGTAAGAGAATTATGCAGTGCTGCCATAACCATGAGTGATAACACTGCGGCCAACTTACTTCTGA
CAACGATCGGAGGACCGAAGGAGCTAACCGCTTTTTTGCACAACATGGGGGATCATGTAACTCGCCTTGATCGT
TGGGAACCGGAGCTGAATGAAGCCATACCAAACGACGAGCGTGACACCACGATGCCTGTAGCAATGGCAACAA
CGTTGCGCAAACTATTAACTGGCGAACTACTTACTCTAGCTTCCCGGCAACAATTAATAGACTGGATGGAGGCG
GATAAAGTTGCAGGACCACTTCTGCGCTCGGCCCTTCCGGCTGGCTGGTTTATTGCTGATAAATCTGGAGCCGG
TGAGCGTGGAAGCCGCGGTATCATTGCAGCACTGGGGCCAGATGGTAAGCCCTCCCGTATCGTAGTTATCTACA
CGACGGGGAGTCAGGCAACTATGGATGAACGAAATAGACAGATCGCTGAGATAGGTGCCTCACTGATTAAGCAT
TGGTAACTGTCAGACCAAGTTTACTCATATATACTTTAGATTGATTTAAAACTTCATTTTTAATTTAAAAGGATCTAG
GTGAAGATCCTTTTTGATAATCTCATGACCAAAATCCCTTAACGTGAGTTTTCGTTCCACTGAGCGTCAGACCCC
GTAGAAAAGATCAAAGGATCTTCTTGAGATCCTTTTTTTCTGCGCGTAATCTGCTGCTTGCAAACAAAAAAACCAC
CGCTACCAGCGGTGGTTTGTTTGCCGGATCAAGAGCTACCAACTCTTTTTCCGAAGGTAACTGGCTTCAGCAGA
GCGCAGATACCAAATACTGTTCTTCTAGTGTAGCCGTAGTTAGGCCACCACTTCAAGAACTCTGTAGCACCGCCT
ACATACCTCGCTCTGCTAATCCTGTTACCAGTGGCTGCTGCCAGTGGCGATAAGTCGTGTCTTACCGGGTTGGA
CTCAAGACGATAGTTACCGGATAAGGCGCAGCGGTCGGGCTGAACGGGGGGTTCGTGCACACAGCCCAGCTTG
GAGCGAACGACCTACACCGAACTGAGATACCTACAGCGTGAGCTATGAGAAAGCGCCACGCTTCCCGAAGGGA
GAAAGGCGGACAGGTATCCGGTAAGCGGCAGGGTCGGAACAGGAGAGCGCACGAGGGAGCTTCCAGGGGGA
AACGCCTGGTATCTTTATAGTCCTGTCGGGTTTCGCCACCTCTGACTTGAGCGTCGATTTTTGTGATGCTCGTCA
GGGGGGCGGAGCCTATGGAAAAACGCCAGCAACGCGGCCTTTTTACGGTTCCTGGCCTTTTGCTGGCCTTTTG
CTCACATGT
pAAV-CMV-sadCas9-U6gRNA(Kcna2-sa_sgRNA3) used in in vitro qPCR experiments (SEQ ID NO: 68)
CCTGCAGGCAGCTGCGCGCTCGCTCGCTCACTGAGGCCGCCCGGGCGTCGGGCGACCTTTGGTCGCCCGGCC
TCAGTGAGCGAGCGAGCGCGCAGAGAGGGAGTGGCCAACTCCATCACTAGGGGTTCCTGCGGCCTCTAGACTC
GAGGCGTTGACATTGATTATTGACTAGTTATTAATAGTAATCAATTACGGGGTCATTAGTTCATAGCCCATATATG
GAGTTCCGCGTTACATAACTTACGGTAAATGGCCCGCCTGGCTGACCGCCCAACGACCCCCGCCCATTGACGT
CAATAATGACGTATGTTCCCATAGTAACGCCAATAGGGACTTTCCATTGACGTCAATGGGTGGAGTATTTACGGT
AAACTGCCCACTTGGCAGTACATCAAGTGTATCATATGCCAAGTACGCCCCCTATTGACGTCAATGACGGTAAAT
GGCCCGCCTGGCATTATGCCCAGTACATGACCTTATGGGACTTTCCTACTTGGCAGTACATCTACGTATTAGTCA
TCGCTATTACCATGGTGATGCGGTTTTGGCAGTACATCAATGGGCGTGGATAGCGGTTTGACTCACGGGGATTT
CCAAGTCTCCACCCCATTGACGTCAATGGGAGTTTGTTTTGGCACCAAAATCAACGGGACTTTCCAAAATGTCGT
AACAACTCCGCCCCATTGACGCAAATGGGCGGTAGGCGTGTACGGTGGGAGGTCTATATAAGCAGAGCTCTCT
GGCTAACTACCGGTGCCACCATGGCCCCAAAGAAGAAGCGGAAGGTCGGTATCCACGGAGTCCCAGCAGCCAA
GCGGAACTACATCCTGGGCCTGGCCATCGGCATCACCAGCGTGGGCTACGGCATCATCGACTACGAGACACGG
GACGTGATCGATGCCGGCGTGCGGCTGTTCAAAGAGGCCAACGTGGAAAACAACGAGGGCAGGCGGAGCAAG
AGAGGCGCCAGAAGGCTGAAGCGGCGGAGGCGGCATAGAATCCAGAGAGTGAAGAAGCTGCTGTTCGACTAC
AACCTGCTGACCGACCACAGCGAGCTGAGCGGCATCAACCCCTACGAGGCCAGAGTGAAGGGCCTGAGCCAG
AAGCTGAGCGAGGAAGAGTTCTCTGCCGCCCTGCTGCACCTGGCCAAGAGAAGAGGCGTGCACAACGTGAACG
AGGTGGAAGAGGACACCGGCAACGAGCTGTCCACCAAAGAGCAGATCAGCCGGAACAGCAAGGCCCTGGAAG
AGAAATACGTGGCCGAACTGCAGCTGGAACGGCTGAAGAAAGACGGCGAAGTGCGGGGCAGCATCAACAGATT
CAAGACCAGCGACTACGTGAAAGAAGCCAAACAGCTGCTGAAGGTGCAGAAGGCCTACCACCAGCTGGACCAG
AGCTTCATCGACACCTACATCGACCTGCTGGAAACCCGGCGGACCTACTATGAGGGACCTGGCGAGGGCAGCC
CCTTCGGCTGGAAGGACATCAAAGAATGGTACGAGATGCTGATGGGCCACTGCACCTACTTCCCCGAGGAACT
GCGGAGCGTGAAGTACGCCTACAACGCCGACCTGTACAACGCCCTGAACGACCTGAACAATCTCGTGATCACC
AGGGACGAGAACGAGAAGCTGGAATATTACGAGAAGTTCCAGATCATCGAGAACGTGTTCAAGCAGAAGAAGAA
GCCCACCCTGAAGCAGATCGCCAAAGAAATCCTCGTGAACGAAGAGGATATTAAGGGCTACAGAGTGACCAGCA
CCGGCAAGCCCGAGTTCACCAACCTGAAGGTGTACCACGACATCAAGGACATTACCGCCCGGAAAGAGATTATT
GAGAACGCCGAGCTGCTGGATCAGATTGCCAAGATCCTGACCATCTACCAGAGCAGCGAGGACATCCAGGAAG
AACTGACCAATCTGAACTCCGAGCTGACCCAGGAAGAGATCGAGCAGATCTCTAATCTGAAGGGCTATACCGGC
ACCCACAACCTGAGCCTGAAGGCCATCAACCTGATCCTGGACGAGCTGTGGCACACCAACGACAACCAGATCG
CTATCTTCAACCGGCTGAAGCTGGTGCCCAAGAAGGTGGACCTGTCCCAGCAGAAAGAGATCCCCACCACCCT
GGTGGACGACTTCATCCTGAGCCCCGTCGTGAAGAGAAGCTTCATCCAGAGCATCAAAGTGATCAACGCCATCA
TCAAGAAGTACGGCCTGCCCAACGACATCATTATCGAGCTGGCCCGCGAGAAGAACTCCAAGGACGCCCAGAA
AATGATCAACGAGATGCAGAAGCGGAACCGGCAGACCAACGAGCGGATCGAGGAAATCATCCGGACCACCGGC
AAAGAGAACGCCAAGTACCTGATCGAGAAGATCAAGCTGCACGACATGCAGGAAGGCAAGTGCCTGTACAGCC
TGGAAGCCATCCCTCTGGAAGATCTGCTGAACAACCCCTTCAACTATGAGGTGGACCACATCATCCCCAGAAGC
GTGTCCTTCGACAACAGCTTCAACAACAAGGTGCTCGTGAAGCAGGAAGAAGCCAGCAAGAAGGGCAACCGGA
CCCCATTCCAGTACCTGAGCAGCAGCGACAGCAAGATCAGCTACGAAACCTTCAAGAAGCACATCCTGAATCTG
GCCAAGGGCAAGGGCAGAATCAGCAAGACCAAGAAAGAGTATCTGCTGGAAGAACGGGACATCAACAGGTTCT
CCGTGCAGAAAGACTTCATCAACCGGAACCTGGTGGATACCAGATACGCCACCAGAGGCCTGATGAACCTGCT
GCGGAGCTACTTCAGAGTGAACAACCTGGACGTGAAAGTGAAGTCCATCAATGGCGGCTTCACCAGCTTTCTGC
GGCGGAAGTGGAAGTTTAAGAAAGAGCGGAACAAGGGGTACAAGCACCACGCCGAGGACGCCCTGATCATTGC
CAACGCCGATTTCATCTTCAAAGAGTGGAAGAAACTGGACAAGGCCAAAAAAGTGATGGAAAACCAGATGTTCG
AGGAAAAGCAGGCCGAGAGCATGCCCGAGATCGAAACCGAGCAGGAGTACAAAGAGATCTTCATCACCCCCCA
CCAGATCAAGCACATTAAGGACTTCAAGGACTACAAGTACAGCCACCGGGTGGACAAGAAGCCTAATAGAGAGC
TGATTAACGACACCCTGTACTCCACCCGGAAGGACGACAAGGGCAACACCCTGATCGTGAACAATCTGAACGGC
CTGTACGACAAGGACAATGACAAGCTGAAAAAGCTGATCAACAAGAGCCCCGAAAAGCTGCTGATGTACCACCA
CGACCCCCAGACCTACCAGAAACTGAAGCTGATTATGGAACAGTACGGCGACGAGAAGAATCCCCTGTACAAGT
ACTACGAGGAAACCGGGAACTACCTGACCAAGTACTCCAAAAAGGACAACGGCCCCGTGATCAAGAAGATTAAG
TATTACGGCAACAAACTGAACGCCCATCTGGACATCACCGACGACTACCCCAACAGCAGAAACAAGGTCGTGAA
GCTGTCCCTGAAGCCCTACAGATTCGACGTGTACCTGGACAATGGCGTGTACAAGTTCGTGACCGTGAAGAATC
TGGATGTGATCAAAAAAGAAAACTACTACGAAGTGAATAGCAAGTGCTATGAGGAAGCTAAGAAGCTGAAGAAGA
TCAGCAACCAGGCCGAGTTTATCGCCTCCTTCTACAACAACGATCTGATCAAGATCAACGGCGAGCTGTATAGA
GTGATCGGCGTGAACAACGACCTGCTGAACCGGATCGAAGTGAACATGATCGACATCACCTACCGCGAGTACCT
GGAAAACATGAACGACAAGAGGCCCCCCAGGATCATTAAGACAATCGCCTCCAAGACCCAGAGCATTAAGAAGT
ACAGCACAGACATTCTGGGCAACCTGTATGAAGTGAAATCTAAGAAGCACCCTCAGATCATCAAAAAGGGCAAAA
GGCCGGCGGCCACGAAAAAGGCCGGCCAGGCAAAAAAGAAAAAGGGATCCGGACGGGCTGACGCATTGGACG
ATTTTGATCTGGATATGCTGGGAAGTGACGCCCTCGATGATTTTGACCTTGACATGCTTGGTTCGGATGCCCTTG
ATGACTTTGACCTCGACATGCTCGGCAGTGACGCCCTTGATGATTTCGACCTGGACATGCTGATTAACTGTACAG
GCAGTGGAGAGGGCAGAGGAAGTCTGCTAACATGCGGTGACGTCGAGGAGAATCCTGGCCCAATGGCCAAGC
CTTTGTCTCAAGAAGAATCCACCCTCATTGAAAGAGCAACGGCTACAATCAACAGCATCCCCATCTCTGAAGACT
ACAGCGTCGCCAGCGCAGCTCTCTCTAGCGACGGCCGCATCTTCACTGGTGTCAATGTATATCATTTTACTGGG
GGACCTTGTGCAGAACTCGTGGTGCTGGGCACTGCTGCTGCTGCGGCAGCTGGCAACCTGACTTGTATCGTCG
CGATCGGAAATGAGAACAGGGGCATCTTGAGCCCCTGCGGACGGTGCCGACAGGTGCTTCTCGATCTGCATCC
TGGGATCAAAGCCATAGTGAAGGACAGTGATGGACAGCCGACGGCAGTTGGGATTCGTGAATTGCTGCCCTCT
GGTTATGTGTGGGAGGGCTAAGAATTCCTAGAGCTCGCTGATCAGCCTCGACTGTGCCTTCTAGTTGCCAGCCA
TCTGTTGTTTGCCCCTCCCCCGTGCCTTCCTTGACCCTGGAAGGTGCCACTCCCACTGTCCTTTCCTAATAAAAT
GAGGAAATTGCATCGCATTGTCTGAGTAGGTGTCATTCTATTCTGGGGGGTGGGGTGGGGCAGGACAGCAAGG
GGGAGGATTGGGAAGAGAATAGCAGGCATGCTGGGGAGGTACCGAGGGCCTATTTCCCATGATTCCTTCATATT
TGCATATACGATACAAGGCTGTTAGAGAGATAATTGGAATTAATTTGACTGTAAACACAAAGATATTAGTACAAAA
TACGTGACGTAGAAAGTAATAATTTCTTGGGTAGTTTGCAGTTTTAAAATTATGTTTTAAAATGGACTATCATATGC
TTACCGTAACTTGAAAGTATTTCGATTTCTTGGCTTTATATATCTTGTGGAAAGGACGAAAcaccGCCCGCAGCGAA
CTCGAATTAAgTTTTAGTACTCTGGAAACAGAATCTACTAAAACAAGGCAAAATGCCGTGTTTATCTCGTCAACTT
GTTGGCGAGATTTTTGCGGCCGCAGGAACCCCTAGTGATGGAGTTGGCCACTCCCTCTCTGCGCGCTCGCTCG
CTCACTGAGGCCGGGCGACCAAAGGTCGCCCGACGCCCGGGCTTTGCCCGGGCGGCCTCAGTGAGCGAGCG
AGCGCGCAGCTGCCTGCAGGGGCGCCTGATGCGGTATTTTCTCCTTACGCATCTGTGCGGTATTTCACACCGCA
TACGTCAAAGCAACCATAGTACGCGCCCTGTAGCGGCGCATTAAGCGCGGCGGGTGTGGTGGTTACGCGCAGC
GTGACCGCTACACTTGCCAGCGCCTTAGCGCCCGCTCCTTTCGCTTTCTTCCCTTCCTTTCTCGCCACGTTCGC
CGGCTTTCCCCGTCAAGCTCTAAATCGGGGGCTCCCTTTAGGGTTCCGATTTAGTGCTTTACGGCACCTCGACC
CCAAAAAACTTGATTTGGGTGATGGTTCACGTAGTGGGCCATCGCCCTGATAGACGGTTTTTCGCCCTTTGACGT
TGGAGTCCACGTTCTTTAATAGTGGACTCTTGTTCCAAACTGGAACAACACTCAACTCTATCTCGGGCTATTCTTT
TGATTTATAAGGGATTTTGCCGATTTCGGTCTATTGGTTAAAAAATGAGCTGATTTAACAAAAATTTAACGCGAATT
TTAACAAAATATTAACGTTTACAATTTTATGGTGCACTCTCAGTACAATCTGCTCTGATGCCGCATAGTTAAGCCA
GCCCCGACACCCGCCAACACCCGCTGACGCGCCCTGACGGGCTTGTCTGCTCCCGGCATCCGCTTACAGACAA
GCTGTGACCGTCTCCGGGAGCTGCATGTGTCAGAGGTTTTCACCGTCATCACCGAAACGCGCGAGACGAAAGG
GCCTCGTGATACGCCTATTTTTATAGGTTAATGTCATGATAATAATGGTTTCTTAGACGTCAGGTGGCACTTTTCG
GGGAAATGTGCGCGGAACCCCTATTTGTTTATTTTTCTAAATACATTCAAATATGTATCCGCTCATGAGACAATAA
CCCTGATAAATGCTTCAATAATATTGAAAAAGGAAGAGTATGAGTATTCAACATTTCCGTGTCGCCCTTATTCCCT
TTTTTGCGGCATTTTGCCTTCCTGTTTTTGCTCACCCAGAAACGCTGGTGAAAGTAAAAGATGCTGAAGATCAGTT
GGGTGCACGAGTGGGTTACATCGAACTGGATCTCAACAGCGGTAAGATCCTTGAGAGTTTTCGCCCCGAAGAAC
GTTTTCCAATGATGAGCACTTTTAAAGTTCTGCTATGTGGCGCGGTATTATCCCGTATTGACGCCGGGCAAGAGC
AACTCGGTCGCCGCATACACTATTCTCAGAATGACTTGGTTGAGTACTCACCAGTCACAGAAAAGCATCTTACGG
ATGGCATGACAGTAAGAGAATTATGCAGTGCTGCCATAACCATGAGTGATAACACTGCGGCCAACTTACTTCTGA
CAACGATCGGAGGACCGAAGGAGCTAACCGCTTTTTTGCACAACATGGGGGATCATGTAACTCGCCTTGATCGT
TGGGAACCGGAGCTGAATGAAGCCATACCAAACGACGAGCGTGACACCACGATGCCTGTAGCAATGGCAACAA
CGTTGCGCAAACTATTAACTGGCGAACTACTTACTCTAGCTTCCCGGCAACAATTAATAGACTGGATGGAGGCG
GATAAAGTTGCAGGACCACTTCTGCGCTCGGCCCTTCCGGCTGGCTGGTTTATTGCTGATAAATCTGGAGCCGG
TGAGCGTGGAAGCCGCGGTATCATTGCAGCACTGGGGCCAGATGGTAAGCCCTCCCGTATCGTAGTTATCTACA
CGACGGGGAGTCAGGCAACTATGGATGAACGAAATAGACAGATCGCTGAGATAGGTGCCTCACTGATTAAGCAT
TGGTAACTGTCAGACCAAGTTTACTCATATATACTTTAGATTGATTTAAAACTTCATTTTTAATTTAAAAGGATCTAG
GTGAAGATCCTTTTTGATAATCTCATGACCAAAATCCCTTAACGTGAGTTTTCGTTCCACTGAGCGTCAGACCCC
GTAGAAAAGATCAAAGGATCTTCTTGAGATCCTTTTTTTCTGCGCGTAATCTGCTGCTTGCAAACAAAAAAACCAC
CGCTACCAGCGGTGGTTTGTTTGCCGGATCAAGAGCTACCAACTCTTTTTCCGAAGGTAACTGGCTTCAGCAGA
GCGCAGATACCAAATACTGTTCTTCTAGTGTAGCCGTAGTTAGGCCACCACTTCAAGAACTCTGTAGCACCGCCT
ACATACCTCGCTCTGCTAATCCTGTTACCAGTGGCTGCTGCCAGTGGCGATAAGTCGTGTCTTACCGGGTTGGA
CTCAAGACGATAGTTACCGGATAAGGCGCAGCGGTCGGGCTGAACGGGGGGTTCGTGCACACAGCCCAGCTTG
GAGCGAACGACCTACACCGAACTGAGATACCTACAGCGTGAGCTATGAGAAAGCGCCACGCTTCCCGAAGGGA
GAAAGGCGGACAGGTATCCGGTAAGCGGCAGGGTCGGAACAGGAGAGCGCACGAGGGAGCTTCCAGGGGGA
AACGCCTGGTATCTTTATAGTCCTGTCGGGTTTCGCCACCTCTGACTTGAGCGTCGATTTTTGTGATGCTCGTCA
GGGGGGCGGAGCCTATGGAAAAACGCCAGCAACGCGGCCTTTTTACGGTTCCTGGCCTTTTGCTGGCCTTTTG
CTCACATGT
1.4 LGI1
Nucleotide sequence of sasgRNA for mouse LGI1; sgRNA1 (SEQ ID NO: 69)
TGCCTGAGCGAGGAACAGCTC
Nucleotide sequence of sasgRNA for mouse LGI1; sgRNA2 (SEQ ID NO: 70)
CACTGCTGGGGGAAGAGACCT
Nucleotide sequence of sasgRNA for mouse LGI1; sgRNA3 (SEQ ID NO: 71)
GACCTGTGAGGTGCTGCGAGG
pAAV-CMV-sadCas9-U6gRNA(Lgi1-sa_sgRNA1) used in in vitro qPCR experiments (SEQ ID NO: 72)
CCTGCAGGCAGCTGCGCGCTCGCTCGCTCACTGAGGCCGCCCGGGCGTCGGGCGACCTTTGGTCGCCCGGCC
TCAGTGAGCGAGCGAGCGCGCAGAGAGGGAGTGGCCAACTCCATCACTAGGGGTTCCTGCGGCCTCTAGACTC
GAGGCGTTGACATTGATTATTGACTAGTTATTAATAGTAATCAATTACGGGGTCATTAGTTCATAGCCCATATATG
GAGTTCCGCGTTACATAACTTACGGTAAATGGCCCGCCTGGCTGACCGCCCAACGACCCCCGCCCATTGACGT
CAATAATGACGTATGTTCCCATAGTAACGCCAATAGGGACTTTCCATTGACGTCAATGGGTGGAGTATTTACGGT
AAACTGCCCACTTGGCAGTACATCAAGTGTATCATATGCCAAGTACGCCCCCTATTGACGTCAATGACGGTAAAT
GGCCCGCCTGGCATTATGCCCAGTACATGACCTTATGGGACTTTCCTACTTGGCAGTACATCTACGTATTAGTCA
TCGCTATTACCATGGTGATGCGGTTTTGGCAGTACATCAATGGGCGTGGATAGCGGTTTGACTCACGGGGATTT
CCAAGTCTCCACCCCATTGACGTCAATGGGAGTTTGTTTTGGCACCAAAATCAACGGGACTTTCCAAAATGTCGT
AACAACTCCGCCCCATTGACGCAAATGGGCGGTAGGCGTGTACGGTGGGAGGTCTATATAAGCAGAGCTCTCT
GGCTAACTACCGGTGCCACCATGGCCCCAAAGAAGAAGCGGAAGGTCGGTATCCACGGAGTCCCAGCAGCCAA
GCGGAACTACATCCTGGGCCTGGCCATCGGCATCACCAGCGTGGGCTACGGCATCATCGACTACGAGACACGG
GACGTGATCGATGCCGGCGTGCGGCTGTTCAAAGAGGCCAACGTGGAAAACAACGAGGGCAGGCGGAGCAAG
AGAGGCGCCAGAAGGCTGAAGCGGCGGAGGCGGCATAGAATCCAGAGAGTGAAGAAGCTGCTGTTCGACTAC
AACCTGCTGACCGACCACAGCGAGCTGAGCGGCATCAACCCCTACGAGGCCAGAGTGAAGGGCCTGAGCCAG
AAGCTGAGCGAGGAAGAGTTCTCTGCCGCCCTGCTGCACCTGGCCAAGAGAAGAGGCGTGCACAACGTGAACG
AGGTGGAAGAGGACACCGGCAACGAGCTGTCCACCAAAGAGCAGATCAGCCGGAACAGCAAGGCCCTGGAAG
AGAAATACGTGGCCGAACTGCAGCTGGAACGGCTGAAGAAAGACGGCGAAGTGCGGGGCAGCATCAACAGATT
CAAGACCAGCGACTACGTGAAAGAAGCCAAACAGCTGCTGAAGGTGCAGAAGGCCTACCACCAGCTGGACCAG
AGCTTCATCGACACCTACATCGACCTGCTGGAAACCCGGCGGACCTACTATGAGGGACCTGGCGAGGGCAGCC
CCTTCGGCTGGAAGGACATCAAAGAATGGTACGAGATGCTGATGGGCCACTGCACCTACTTCCCCGAGGAACT
GCGGAGCGTGAAGTACGCCTACAACGCCGACCTGTACAACGCCCTGAACGACCTGAACAATCTCGTGATCACC
AGGGACGAGAACGAGAAGCTGGAATATTACGAGAAGTTCCAGATCATCGAGAACGTGTTCAAGCAGAAGAAGAA
GCCCACCCTGAAGCAGATCGCCAAAGAAATCCTCGTGAACGAAGAGGATATTAAGGGCTACAGAGTGACCAGCA
CCGGCAAGCCCGAGTTCACCAACCTGAAGGTGTACCACGACATCAAGGACATTACCGCCCGGAAAGAGATTATT
GAGAACGCCGAGCTGCTGGATCAGATTGCCAAGATCCTGACCATCTACCAGAGCAGCGAGGACATCCAGGAAG
AACTGACCAATCTGAACTCCGAGCTGACCCAGGAAGAGATCGAGCAGATCTCTAATCTGAAGGGCTATACCGGC
ACCCACAACCTGAGCCTGAAGGCCATCAACCTGATCCTGGACGAGCTGTGGCACACCAACGACAACCAGATCG
CTATCTTCAACCGGCTGAAGCTGGTGCCCAAGAAGGTGGACCTGTCCCAGCAGAAAGAGATCCCCACCACCCT
GGTGGACGACTTCATCCTGAGCCCCGTCGTGAAGAGAAGCTTCATCCAGAGCATCAAAGTGATCAACGCCATCA
TCAAGAAGTACGGCCTGCCCAACGACATCATTATCGAGCTGGCCCGCGAGAAGAACTCCAAGGACGCCCAGAA
AATGATCAACGAGATGCAGAAGCGGAACCGGCAGACCAACGAGCGGATCGAGGAAATCATCCGGACCACCGGC
AAAGAGAACGCCAAGTACCTGATCGAGAAGATCAAGCTGCACGACATGCAGGAAGGCAAGTGCCTGTACAGCC
TGGAAGCCATCCCTCTGGAAGATCTGCTGAACAACCCCTTCAACTATGAGGTGGACCACATCATCCCCAGAAGC
GTGTCCTTCGACAACAGCTTCAACAACAAGGTGCTCGTGAAGCAGGAAGAAGCCAGCAAGAAGGGCAACCGGA
CCCCATTCCAGTACCTGAGCAGCAGCGACAGCAAGATCAGCTACGAAACCTTCAAGAAGCACATCCTGAATCTG
GCCAAGGGCAAGGGCAGAATCAGCAAGACCAAGAAAGAGTATCTGCTGGAAGAACGGGACATCAACAGGTTCT
CCGTGCAGAAAGACTTCATCAACCGGAACCTGGTGGATACCAGATACGCCACCAGAGGCCTGATGAACCTGCT
GCGGAGCTACTTCAGAGTGAACAACCTGGACGTGAAAGTGAAGTCCATCAATGGCGGCTTCACCAGCTTTCTGC
GGCGGAAGTGGAAGTTTAAGAAAGAGCGGAACAAGGGGTACAAGCACCACGCCGAGGACGCCCTGATCATTGC
CAACGCCGATTTCATCTTCAAAGAGTGGAAGAAACTGGACAAGGCCAAAAAAGTGATGGAAAACCAGATGTTCG
AGGAAAAGCAGGCCGAGAGCATGCCCGAGATCGAAACCGAGCAGGAGTACAAAGAGATCTTCATCACCCCCCA
CCAGATCAAGCACATTAAGGACTTCAAGGACTACAAGTACAGCCACCGGGTGGACAAGAAGCCTAATAGAGAGC
TGATTAACGACACCCTGTACTCCACCCGGAAGGACGACAAGGGCAACACCCTGATCGTGAACAATCTGAACGGC
CTGTACGACAAGGACAATGACAAGCTGAAAAAGCTGATCAACAAGAGCCCCGAAAAGCTGCTGATGTACCACCA
CGACCCCCAGACCTACCAGAAACTGAAGCTGATTATGGAACAGTACGGCGACGAGAAGAATCCCCTGTACAAGT
ACTACGAGGAAACCGGGAACTACCTGACCAAGTACTCCAAAAAGGACAACGGCCCCGTGATCAAGAAGATTAAG
TATTACGGCAACAAACTGAACGCCCATCTGGACATCACCGACGACTACCCCAACAGCAGAAACAAGGTCGTGAA
GCTGTCCCTGAAGCCCTACAGATTCGACGTGTACCTGGACAATGGCGTGTACAAGTTCGTGACCGTGAAGAATC
TGGATGTGATCAAAAAAGAAAACTACTACGAAGTGAATAGCAAGTGCTATGAGGAAGCTAAGAAGCTGAAGAAGA
TCAGCAACCAGGCCGAGTTTATCGCCTCCTTCTACAACAACGATCTGATCAAGATCAACGGCGAGCTGTATAGA
GTGATCGGCGTGAACAACGACCTGCTGAACCGGATCGAAGTGAACATGATCGACATCACCTACCGCGAGTACCT
GGAAAACATGAACGACAAGAGGCCCCCCAGGATCATTAAGACAATCGCCTCCAAGACCCAGAGCATTAAGAAGT
ACAGCACAGACATTCTGGGCAACCTGTATGAAGTGAAATCTAAGAAGCACCCTCAGATCATCAAAAAGGGCAAAA
GGCCGGCGGCCACGAAAAAGGCCGGCCAGGCAAAAAAGAAAAAGGGATCCGGACGGGCTGACGCATTGGACG
ATTTTGATCTGGATATGCTGGGAAGTGACGCCCTCGATGATTTTGACCTTGACATGCTTGGTTCGGATGCCCTTG
ATGACTTTGACCTCGACATGCTCGGCAGTGACGCCCTTGATGATTTCGACCTGGACATGCTGATTAACTGTACAG
GCAGTGGAGAGGGCAGAGGAAGTCTGCTAACATGCGGTGACGTCGAGGAGAATCCTGGCCCAATGGCCAAGC
CTTTGTCTCAAGAAGAATCCACCCTCATTGAAAGAGCAACGGCTACAATCAACAGCATCCCCATCTCTGAAGACT
ACAGCGTCGCCAGCGCAGCTCTCTCTAGCGACGGCCGCATCTTCACTGGTGTCAATGTATATCATTTTACTGGG
GGACCTTGTGCAGAACTCGTGGTGCTGGGCACTGCTGCTGCTGCGGCAGCTGGCAACCTGACTTGTATCGTCG
CGATCGGAAATGAGAACAGGGGCATCTTGAGCCCCTGCGGACGGTGCCGACAGGTGCTTCTCGATCTGCATCC
TGGGATCAAAGCCATAGTGAAGGACAGTGATGGACAGCCGACGGCAGTTGGGATTCGTGAATTGCTGCCCTCT
GGTTATGTGTGGGAGGGCTAAGAATTCCTAGAGCTCGCTGATCAGCCTCGACTGTGCCTTCTAGTTGCCAGCCA
TCTGTTGTTTGCCCCTCCCCCGTGCCTTCCTTGACCCTGGAAGGTGCCACTCCCACTGTCCTTTCCTAATAAAAT
GAGGAAATTGCATCGCATTGTCTGAGTAGGTGTCATTCTATTCTGGGGGGTGGGGTGGGGCAGGACAGCAAGG
GGGAGGATTGGGAAGAGAATAGCAGGCATGCTGGGGAGGTACCGAGGGCCTATTTCCCATGATTCCTTCATATT
TGCATATACGATACAAGGCTGTTAGAGAGATAATTGGAATTAATTTGACTGTAAACACAAAGATATTAGTACAAAA
TACGTGACGTAGAAAGTAATAATTTCTTGGGTAGTTTGCAGTTTTAAAATTATGTTTTAAAATGGACTATCATATGC
TTACCGTAACTTGAAAGTATTTCGATTTCTTGGCTTTATATATCTTGTGGAAAGGACGAAAcaccgTGCCTGAGCGA
GGAACAGCTCgTTTTAGTACTCTGGAAACAGAATCTACTAAAACAAGGCAAAATGCCGTGTTTATCTCGTCAACTT
GTTGGCGAGATTTTTGCGGCCGCAGGAACCCCTAGTGATGGAGTTGGCCACTCCCTCTCTGCGCGCTCGCTCG
CTCACTGAGGCCGGGCGACCAAAGGTCGCCCGACGCCCGGGCTTTGCCCGGGCGGCCTCAGTGAGCGAGCG
AGCGCGCAGCTGCCTGCAGGGGCGCCTGATGCGGTATTTTCTCCTTACGCATCTGTGCGGTATTTCACACCGCA
TACGTCAAAGCAACCATAGTACGCGCCCTGTAGCGGCGCATTAAGCGCGGCGGGTGTGGTGGTTACGCGCAGC
GTGACCGCTACACTTGCCAGCGCCTTAGCGCCCGCTCCTTTCGCTTTCTTCCCTTCCTTTCTCGCCACGTTCGC
CGGCTTTCCCCGTCAAGCTCTAAATCGGGGGCTCCCTTTAGGGTTCCGATTTAGTGCTTTACGGCACCTCGACC
CCAAAAAACTTGATTTGGGTGATGGTTCACGTAGTGGGCCATCGCCCTGATAGACGGTTTTTCGCCCTTTGACGT
TGGAGTCCACGTTCTTTAATAGTGGACTCTTGTTCCAAACTGGAACAACACTCAACTCTATCTCGGGCTATTCTTT
TGATTTATAAGGGATTTTGCCGATTTCGGTCTATTGGTTAAAAAATGAGCTGATTTAACAAAAATTTAACGCGAATT
TTAACAAAATATTAACGTTTACAATTTTATGGTGCACTCTCAGTACAATCTGCTCTGATGCCGCATAGTTAAGCCA
GCCCCGACACCCGCCAACACCCGCTGACGCGCCCTGACGGGCTTGTCTGCTCCCGGCATCCGCTTACAGACAA
GCTGTGACCGTCTCCGGGAGCTGCATGTGTCAGAGGTTTTCACCGTCATCACCGAAACGCGCGAGACGAAAGG
GCCTCGTGATACGCCTATTTTTATAGGTTAATGTCATGATAATAATGGTTTCTTAGACGTCAGGTGGCACTTTTCG
GGGAAATGTGCGCGGAACCCCTATTTGTTTATTTTTCTAAATACATTCAAATATGTATCCGCTCATGAGACAATAA
CCCTGATAAATGCTTCAATAATATTGAAAAAGGAAGAGTATGAGTATTCAACATTTCCGTGTCGCCCTTATTCCCT
TTTTTGCGGCATTTTGCCTTCCTGTTTTTGCTCACCCAGAAACGCTGGTGAAAGTAAAAGATGCTGAAGATCAGTT
GGGTGCACGAGTGGGTTACATCGAACTGGATCTCAACAGCGGTAAGATCCTTGAGAGTTTTCGCCCCGAAGAAC
GTTTTCCAATGATGAGCACTTTTAAAGTTCTGCTATGTGGCGCGGTATTATCCCGTATTGACGCCGGGCAAGAGC
AACTCGGTCGCCGCATACACTATTCTCAGAATGACTTGGTTGAGTACTCACCAGTCACAGAAAAGCATCTTACGG
ATGGCATGACAGTAAGAGAATTATGCAGTGCTGCCATAACCATGAGTGATAACACTGCGGCCAACTTACTTCTGA
CAACGATCGGAGGACCGAAGGAGCTAACCGCTTTTTTGCACAACATGGGGGATCATGTAACTCGCCTTGATCGT
TGGGAACCGGAGCTGAATGAAGCCATACCAAACGACGAGCGTGACACCACGATGCCTGTAGCAATGGCAACAA
CGTTGCGCAAACTATTAACTGGCGAACTACTTACTCTAGCTTCCCGGCAACAATTAATAGACTGGATGGAGGCG
GATAAAGTTGCAGGACCACTTCTGCGCTCGGCCCTTCCGGCTGGCTGGTTTATTGCTGATAAATCTGGAGCCGG
TGAGCGTGGAAGCCGCGGTATCATTGCAGCACTGGGGCCAGATGGTAAGCCCTCCCGTATCGTAGTTATCTACA
CGACGGGGAGTCAGGCAACTATGGATGAACGAAATAGACAGATCGCTGAGATAGGTGCCTCACTGATTAAGCAT
TGGTAACTGTCAGACCAAGTTTACTCATATATACTTTAGATTGATTTAAAACTTCATTTTTAATTTAAAAGGATCTAG
GTGAAGATCCTTTTTGATAATCTCATGACCAAAATCCCTTAACGTGAGTTTTCGTTCCACTGAGCGTCAGACCCC
GTAGAAAAGATCAAAGGATCTTCTTGAGATCCTTTTTTTCTGCGCGTAATCTGCTGCTTGCAAACAAAAAAACCAC
CGCTACCAGCGGTGGTTTGTTTGCCGGATCAAGAGCTACCAACTCTTTTTCCGAAGGTAACTGGCTTCAGCAGA
GCGCAGATACCAAATACTGTTCTTCTAGTGTAGCCGTAGTTAGGCCACCACTTCAAGAACTCTGTAGCACCGCCT
ACATACCTCGCTCTGCTAATCCTGTTACCAGTGGCTGCTGCCAGTGGCGATAAGTCGTGTCTTACCGGGTTGGA
CTCAAGACGATAGTTACCGGATAAGGCGCAGCGGTCGGGCTGAACGGGGGGTTCGTGCACACAGCCCAGCTTG
GAGCGAACGACCTACACCGAACTGAGATACCTACAGCGTGAGCTATGAGAAAGCGCCACGCTTCCCGAAGGGA
GAAAGGCGGACAGGTATCCGGTAAGCGGCAGGGTCGGAACAGGAGAGCGCACGAGGGAGCTTCCAGGGGGA
AACGCCTGGTATCTTTATAGTCCTGTCGGGTTTCGCCACCTCTGACTTGAGCGTCGATTTTTGTGATGCTCGTCA
GGGGGGCGGAGCCTATGGAAAAACGCCAGCAACGCGGCCTTTTTACGGTTCCTGGCCTTTTGCTGGCCTTTTG
CTCACATGT
pAAV-CMV-sadCas9-U6gRNA(Lgi1-sa_sgRNA2) used in in vitro qPCR experiments (SEQ ID NO: 73)
CCTGCAGGCAGCTGCGCGCTCGCTCGCTCACTGAGGCCGCCCGGGCGTCGGGCGACCTTTGGTCGCCCGGCC
TCAGTGAGCGAGCGAGCGCGCAGAGAGGGAGTGGCCAACTCCATCACTAGGGGTTCCTGCGGCCTCTAGACTC
GAGGCGTTGACATTGATTATTGACTAGTTATTAATAGTAATCAATTACGGGGTCATTAGTTCATAGCCCATATATG
GAGTTCCGCGTTACATAACTTACGGTAAATGGCCCGCCTGGCTGACCGCCCAACGACCCCCGCCCATTGACGT
CAATAATGACGTATGTTCCCATAGTAACGCCAATAGGGACTTTCCATTGACGTCAATGGGTGGAGTATTTACGGT
AAACTGCCCACTTGGCAGTACATCAAGTGTATCATATGCCAAGTACGCCCCCTATTGACGTCAATGACGGTAAAT
GGCCCGCCTGGCATTATGCCCAGTACATGACCTTATGGGACTTTCCTACTTGGCAGTACATCTACGTATTAGTCA
TCGCTATTACCATGGTGATGCGGTTTTGGCAGTACATCAATGGGCGTGGATAGCGGTTTGACTCACGGGGATTT
CCAAGTCTCCACCCCATTGACGTCAATGGGAGTTTGTTTTGGCACCAAAATCAACGGGACTTTCCAAAATGTCGT
AACAACTCCGCCCCATTGACGCAAATGGGCGGTAGGCGTGTACGGTGGGAGGTCTATATAAGCAGAGCTCTCT
GGCTAACTACCGGTGCCACCATGGCCCCAAAGAAGAAGCGGAAGGTCGGTATCCACGGAGTCCCAGCAGCCAA
GCGGAACTACATCCTGGGCCTGGCCATCGGCATCACCAGCGTGGGCTACGGCATCATCGACTACGAGACACGG
GACGTGATCGATGCCGGCGTGCGGCTGTTCAAAGAGGCCAACGTGGAAAACAACGAGGGCAGGCGGAGCAAG
AGAGGCGCCAGAAGGCTGAAGCGGCGGAGGCGGCATAGAATCCAGAGAGTGAAGAAGCTGCTGTTCGACTAC
AACCTGCTGACCGACCACAGCGAGCTGAGCGGCATCAACCCCTACGAGGCCAGAGTGAAGGGCCTGAGCCAG
AAGCTGAGCGAGGAAGAGTTCTCTGCCGCCCTGCTGCACCTGGCCAAGAGAAGAGGCGTGCACAACGTGAACG
AGGTGGAAGAGGACACCGGCAACGAGCTGTCCACCAAAGAGCAGATCAGCCGGAACAGCAAGGCCCTGGAAG
AGAAATACGTGGCCGAACTGCAGCTGGAACGGCTGAAGAAAGACGGCGAAGTGCGGGGCAGCATCAACAGATT
CAAGACCAGCGACTACGTGAAAGAAGCCAAACAGCTGCTGAAGGTGCAGAAGGCCTACCACCAGCTGGACCAG
AGCTTCATCGACACCTACATCGACCTGCTGGAAACCCGGCGGACCTACTATGAGGGACCTGGCGAGGGCAGCC
CCTTCGGCTGGAAGGACATCAAAGAATGGTACGAGATGCTGATGGGCCACTGCACCTACTTCCCCGAGGAACT
GCGGAGCGTGAAGTACGCCTACAACGCCGACCTGTACAACGCCCTGAACGACCTGAACAATCTCGTGATCACC
AGGGACGAGAACGAGAAGCTGGAATATTACGAGAAGTTCCAGATCATCGAGAACGTGTTCAAGCAGAAGAAGAA
GCCCACCCTGAAGCAGATCGCCAAAGAAATCCTCGTGAACGAAGAGGATATTAAGGGCTACAGAGTGACCAGCA
CCGGCAAGCCCGAGTTCACCAACCTGAAGGTGTACCACGACATCAAGGACATTACCGCCCGGAAAGAGATTATT
GAGAACGCCGAGCTGCTGGATCAGATTGCCAAGATCCTGACCATCTACCAGAGCAGCGAGGACATCCAGGAAG
AACTGACCAATCTGAACTCCGAGCTGACCCAGGAAGAGATCGAGCAGATCTCTAATCTGAAGGGCTATACCGGC
ACCCACAACCTGAGCCTGAAGGCCATCAACCTGATCCTGGACGAGCTGTGGCACACCAACGACAACCAGATCG
CTATCTTCAACCGGCTGAAGCTGGTGCCCAAGAAGGTGGACCTGTCCCAGCAGAAAGAGATCCCCACCACCCT
GGTGGACGACTTCATCCTGAGCCCCGTCGTGAAGAGAAGCTTCATCCAGAGCATCAAAGTGATCAACGCCATCA
TCAAGAAGTACGGCCTGCCCAACGACATCATTATCGAGCTGGCCCGCGAGAAGAACTCCAAGGACGCCCAGAA
AATGATCAACGAGATGCAGAAGCGGAACCGGCAGACCAACGAGCGGATCGAGGAAATCATCCGGACCACCGGC
AAAGAGAACGCCAAGTACCTGATCGAGAAGATCAAGCTGCACGACATGCAGGAAGGCAAGTGCCTGTACAGCC
TGGAAGCCATCCCTCTGGAAGATCTGCTGAACAACCCCTTCAACTATGAGGTGGACCACATCATCCCCAGAAGC
GTGTCCTTCGACAACAGCTTCAACAACAAGGTGCTCGTGAAGCAGGAAGAAGCCAGCAAGAAGGGCAACCGGA
CCCCATTCCAGTACCTGAGCAGCAGCGACAGCAAGATCAGCTACGAAACCTTCAAGAAGCACATCCTGAATCTG
GCCAAGGGCAAGGGCAGAATCAGCAAGACCAAGAAAGAGTATCTGCTGGAAGAACGGGACATCAACAGGTTCT
CCGTGCAGAAAGACTTCATCAACCGGAACCTGGTGGATACCAGATACGCCACCAGAGGCCTGATGAACCTGCT
GCGGAGCTACTTCAGAGTGAACAACCTGGACGTGAAAGTGAAGTCCATCAATGGCGGCTTCACCAGCTTTCTGC
GGCGGAAGTGGAAGTTTAAGAAAGAGCGGAACAAGGGGTACAAGCACCACGCCGAGGACGCCCTGATCATTGC
CAACGCCGATTTCATCTTCAAAGAGTGGAAGAAACTGGACAAGGCCAAAAAAGTGATGGAAAACCAGATGTTCG
AGGAAAAGCAGGCCGAGAGCATGCCCGAGATCGAAACCGAGCAGGAGTACAAAGAGATCTTCATCACCCCCCA
CCAGATCAAGCACATTAAGGACTTCAAGGACTACAAGTACAGCCACCGGGTGGACAAGAAGCCTAATAGAGAGC
TGATTAACGACACCCTGTACTCCACCCGGAAGGACGACAAGGGCAACACCCTGATCGTGAACAATCTGAACGGC
CTGTACGACAAGGACAATGACAAGCTGAAAAAGCTGATCAACAAGAGCCCCGAAAAGCTGCTGATGTACCACCA
CGACCCCCAGACCTACCAGAAACTGAAGCTGATTATGGAACAGTACGGCGACGAGAAGAATCCCCTGTACAAGT
ACTACGAGGAAACCGGGAACTACCTGACCAAGTACTCCAAAAAGGACAACGGCCCCGTGATCAAGAAGATTAAG
TATTACGGCAACAAACTGAACGCCCATCTGGACATCACCGACGACTACCCCAACAGCAGAAACAAGGTCGTGAA
GCTGTCCCTGAAGCCCTACAGATTCGACGTGTACCTGGACAATGGCGTGTACAAGTTCGTGACCGTGAAGAATC
TGGATGTGATCAAAAAAGAAAACTACTACGAAGTGAATAGCAAGTGCTATGAGGAAGCTAAGAAGCTGAAGAAGA
TCAGCAACCAGGCCGAGTTTATCGCCTCCTTCTACAACAACGATCTGATCAAGATCAACGGCGAGCTGTATAGA
GTGATCGGCGTGAACAACGACCTGCTGAACCGGATCGAAGTGAACATGATCGACATCACCTACCGCGAGTACCT
GGAAAACATGAACGACAAGAGGCCCCCCAGGATCATTAAGACAATCGCCTCCAAGACCCAGAGCATTAAGAAGT
ACAGCACAGACATTCTGGGCAACCTGTATGAAGTGAAATCTAAGAAGCACCCTCAGATCATCAAAAAGGGCAAAA
GGCCGGCGGCCACGAAAAAGGCCGGCCAGGCAAAAAAGAAAAAGGGATCCGGACGGGCTGACGCATTGGACG
ATTTTGATCTGGATATGCTGGGAAGTGACGCCCTCGATGATTTTGACCTTGACATGCTTGGTTCGGATGCCCTTG
ATGACTTTGACCTCGACATGCTCGGCAGTGACGCCCTTGATGATTTCGACCTGGACATGCTGATTAACTGTACAG
GCAGTGGAGAGGGCAGAGGAAGTCTGCTAACATGCGGTGACGTCGAGGAGAATCCTGGCCCAATGGCCAAGC
CTTTGTCTCAAGAAGAATCCACCCTCATTGAAAGAGCAACGGCTACAATCAACAGCATCCCCATCTCTGAAGACT
ACAGCGTCGCCAGCGCAGCTCTCTCTAGCGACGGCCGCATCTTCACTGGTGTCAATGTATATCATTTTACTGGG
GGACCTTGTGCAGAACTCGTGGTGCTGGGCACTGCTGCTGCTGCGGCAGCTGGCAACCTGACTTGTATCGTCG
CGATCGGAAATGAGAACAGGGGCATCTTGAGCCCCTGCGGACGGTGCCGACAGGTGCTTCTCGATCTGCATCC
TGGGATCAAAGCCATAGTGAAGGACAGTGATGGACAGCCGACGGCAGTTGGGATTCGTGAATTGCTGCCCTCT
GGTTATGTGTGGGAGGGCTAAGAATTCCTAGAGCTCGCTGATCAGCCTCGACTGTGCCTTCTAGTTGCCAGCCA
TCTGTTGTTTGCCCCTCCCCCGTGCCTTCCTTGACCCTGGAAGGTGCCACTCCCACTGTCCTTTCCTAATAAAAT
GAGGAAATTGCATCGCATTGTCTGAGTAGGTGTCATTCTATTCTGGGGGGTGGGGTGGGGCAGGACAGCAAGG
GGGAGGATTGGGAAGAGAATAGCAGGCATGCTGGGGAGGTACCGAGGGCCTATTTCCCATGATTCCTTCATATT
TGCATATACGATACAAGGCTGTTAGAGAGATAATTGGAATTAATTTGACTGTAAACACAAAGATATTAGTACAAAA
TACGTGACGTAGAAAGTAATAATTTCTTGGGTAGTTTGCAGTTTTAAAATTATGTTTTAAAATGGACTATCATATGC
TTACCGTAACTTGAAAGTATTTCGATTTCTTGGCTTTATATATCTTGTGGAAAGGACGAAAcaccgCACTGCTGGGG
GAAGAGACCTgTTTTAGTACTCTGGAAACAGAATCTACTAAAACAAGGCAAAATGCCGTGTTTATCTCGTCAACTT
GTTGGCGAGATTTTTGCGGCCGCAGGAACCCCTAGTGATGGAGTTGGCCACTCCCTCTCTGCGCGCTCGCTCG
CTCACTGAGGCCGGGCGACCAAAGGTCGCCCGACGCCCGGGCTTTGCCCGGGCGGCCTCAGTGAGCGAGCG
AGCGCGCAGCTGCCTGCAGGGGCGCCTGATGCGGTATTTTCTCCTTACGCATCTGTGCGGTATTTCACACCGCA
TACGTCAAAGCAACCATAGTACGCGCCCTGTAGCGGCGCATTAAGCGCGGCGGGTGTGGTGGTTACGCGCAGC
GTGACCGCTACACTTGCCAGCGCCTTAGCGCCCGCTCCTTTCGCTTTCTTCCCTTCCTTTCTCGCCACGTTCGC
CGGCTTTCCCCGTCAAGCTCTAAATCGGGGGCTCCCTTTAGGGTTCCGATTTAGTGCTTTACGGCACCTCGACC
CCAAAAAACTTGATTTGGGTGATGGTTCACGTAGTGGGCCATCGCCCTGATAGACGGTTTTTCGCCCTTTGACGT
TGGAGTCCACGTTCTTTAATAGTGGACTCTTGTTCCAAACTGGAACAACACTCAACTCTATCTCGGGCTATTCTTT
TGATTTATAAGGGATTTTGCCGATTTCGGTCTATTGGTTAAAAAATGAGCTGATTTAACAAAAATTTAACGCGAATT
TTAACAAAATATTAACGTTTACAATTTTATGGTGCACTCTCAGTACAATCTGCTCTGATGCCGCATAGTTAAGCCA
GCCCCGACACCCGCCAACACCCGCTGACGCGCCCTGACGGGCTTGTCTGCTCCCGGCATCCGCTTACAGACAA
GCTGTGACCGTCTCCGGGAGCTGCATGTGTCAGAGGTTTTCACCGTCATCACCGAAACGCGCGAGACGAAAGG
GCCTCGTGATACGCCTATTTTTATAGGTTAATGTCATGATAATAATGGTTTCTTAGACGTCAGGTGGCACTTTTCG
GGGAAATGTGCGCGGAACCCCTATTTGTTTATTTTTCTAAATACATTCAAATATGTATCCGCTCATGAGACAATAA
CCCTGATAAATGCTTCAATAATATTGAAAAAGGAAGAGTATGAGTATTCAACATTTCCGTGTCGCCCTTATTCCCT
TTTTTGCGGCATTTTGCCTTCCTGTTTTTGCTCACCCAGAAACGCTGGTGAAAGTAAAAGATGCTGAAGATCAGTT
GGGTGCACGAGTGGGTTACATCGAACTGGATCTCAACAGCGGTAAGATCCTTGAGAGTTTTCGCCCCGAAGAAC
GTTTTCCAATGATGAGCACTTTTAAAGTTCTGCTATGTGGCGCGGTATTATCCCGTATTGACGCCGGGCAAGAGC
AACTCGGTCGCCGCATACACTATTCTCAGAATGACTTGGTTGAGTACTCACCAGTCACAGAAAAGCATCTTACGG
ATGGCATGACAGTAAGAGAATTATGCAGTGCTGCCATAACCATGAGTGATAACACTGCGGCCAACTTACTTCTGA
CAACGATCGGAGGACCGAAGGAGCTAACCGCTTTTTTGCACAACATGGGGGATCATGTAACTCGCCTTGATCGT
TGGGAACCGGAGCTGAATGAAGCCATACCAAACGACGAGCGTGACACCACGATGCCTGTAGCAATGGCAACAA
CGTTGCGCAAACTATTAACTGGCGAACTACTTACTCTAGCTTCCCGGCAACAATTAATAGACTGGATGGAGGCG
GATAAAGTTGCAGGACCACTTCTGCGCTCGGCCCTTCCGGCTGGCTGGTTTATTGCTGATAAATCTGGAGCCGG
TGAGCGTGGAAGCCGCGGTATCATTGCAGCACTGGGGCCAGATGGTAAGCCCTCCCGTATCGTAGTTATCTACA
CGACGGGGAGTCAGGCAACTATGGATGAACGAAATAGACAGATCGCTGAGATAGGTGCCTCACTGATTAAGCAT
TGGTAACTGTCAGACCAAGTTTACTCATATATACTTTAGATTGATTTAAAACTTCATTTTTAATTTAAAAGGATCTAG
GTGAAGATCCTTTTTGATAATCTCATGACCAAAATCCCTTAACGTGAGTTTTCGTTCCACTGAGCGTCAGACCCC
GTAGAAAAGATCAAAGGATCTTCTTGAGATCCTTTTTTTCTGCGCGTAATCTGCTGCTTGCAAACAAAAAAACCAC
CGCTACCAGCGGTGGTTTGTTTGCCGGATCAAGAGCTACCAACTCTTTTTCCGAAGGTAACTGGCTTCAGCAGA
GCGCAGATACCAAATACTGTTCTTCTAGTGTAGCCGTAGTTAGGCCACCACTTCAAGAACTCTGTAGCACCGCCT
ACATACCTCGCTCTGCTAATCCTGTTACCAGTGGCTGCTGCCAGTGGCGATAAGTCGTGTCTTACCGGGTTGGA
CTCAAGACGATAGTTACCGGATAAGGCGCAGCGGTCGGGCTGAACGGGGGGTTCGTGCACACAGCCCAGCTTG
GAGCGAACGACCTACACCGAACTGAGATACCTACAGCGTGAGCTATGAGAAAGCGCCACGCTTCCCGAAGGGA
GAAAGGCGGACAGGTATCCGGTAAGCGGCAGGGTCGGAACAGGAGAGCGCACGAGGGAGCTTCCAGGGGGA
AACGCCTGGTATCTTTATAGTCCTGTCGGGTTTCGCCACCTCTGACTTGAGCGTCGATTTTTGTGATGCTCGTCA
GGGGGGCGGAGCCTATGGAAAAACGCCAGCAACGCGGCCTTTTTACGGTTCCTGGCCTTTTGCTGGCCTTTTG
CTCACATGT
pAAV-CMV-sadCas9-U6gRNA(Lgi1-sa_sgRNA3) used in in vitro qPCR experiments (SEQ ID NO: 74)
CCTGCAGGCAGCTGCGCGCTCGCTCGCTCACTGAGGCCGCCCGGGCGTCGGGCGACCTTTGGTCGCCCGGCC
TCAGTGAGCGAGCGAGCGCGCAGAGAGGGAGTGGCCAACTCCATCACTAGGGGTTCCTGCGGCCTCTAGACTC
GAGGCGTTGACATTGATTATTGACTAGTTATTAATAGTAATCAATTACGGGGTCATTAGTTCATAGCCCATATATG
GAGTTCCGCGTTACATAACTTACGGTAAATGGCCCGCCTGGCTGACCGCCCAACGACCCCCGCCCATTGACGT
CAATAATGACGTATGTTCCCATAGTAACGCCAATAGGGACTTTCCATTGACGTCAATGGGTGGAGTATTTACGGT
AAACTGCCCACTTGGCAGTACATCAAGTGTATCATATGCCAAGTACGCCCCCTATTGACGTCAATGACGGTAAAT
GGCCCGCCTGGCATTATGCCCAGTACATGACCTTATGGGACTTTCCTACTTGGCAGTACATCTACGTATTAGTCA
TCGCTATTACCATGGTGATGCGGTTTTGGCAGTACATCAATGGGCGTGGATAGCGGTTTGACTCACGGGGATTT
CCAAGTCTCCACCCCATTGACGTCAATGGGAGTTTGTTTTGGCACCAAAATCAACGGGACTTTCCAAAATGTCGT
AACAACTCCGCCCCATTGACGCAAATGGGCGGTAGGCGTGTACGGTGGGAGGTCTATATAAGCAGAGCTCTCT
GGCTAACTACCGGTGCCACCATGGCCCCAAAGAAGAAGCGGAAGGTCGGTATCCACGGAGTCCCAGCAGCCAA
GCGGAACTACATCCTGGGCCTGGCCATCGGCATCACCAGCGTGGGCTACGGCATCATCGACTACGAGACACGG
GACGTGATCGATGCCGGCGTGCGGCTGTTCAAAGAGGCCAACGTGGAAAACAACGAGGGCAGGCGGAGCAAG
AGAGGCGCCAGAAGGCTGAAGCGGCGGAGGCGGCATAGAATCCAGAGAGTGAAGAAGCTGCTGTTCGACTAC
AACCTGCTGACCGACCACAGCGAGCTGAGCGGCATCAACCCCTACGAGGCCAGAGTGAAGGGCCTGAGCCAG
AAGCTGAGCGAGGAAGAGTTCTCTGCCGCCCTGCTGCACCTGGCCAAGAGAAGAGGCGTGCACAACGTGAACG
AGGTGGAAGAGGACACCGGCAACGAGCTGTCCACCAAAGAGCAGATCAGCCGGAACAGCAAGGCCCTGGAAG
AGAAATACGTGGCCGAACTGCAGCTGGAACGGCTGAAGAAAGACGGCGAAGTGCGGGGCAGCATCAACAGATT
CAAGACCAGCGACTACGTGAAAGAAGCCAAACAGCTGCTGAAGGTGCAGAAGGCCTACCACCAGCTGGACCAG
AGCTTCATCGACACCTACATCGACCTGCTGGAAACCCGGCGGACCTACTATGAGGGACCTGGCGAGGGCAGCC
CCTTCGGCTGGAAGGACATCAAAGAATGGTACGAGATGCTGATGGGCCACTGCACCTACTTCCCCGAGGAACT
GCGGAGCGTGAAGTACGCCTACAACGCCGACCTGTACAACGCCCTGAACGACCTGAACAATCTCGTGATCACC
AGGGACGAGAACGAGAAGCTGGAATATTACGAGAAGTTCCAGATCATCGAGAACGTGTTCAAGCAGAAGAAGAA
GCCCACCCTGAAGCAGATCGCCAAAGAAATCCTCGTGAACGAAGAGGATATTAAGGGCTACAGAGTGACCAGCA
CCGGCAAGCCCGAGTTCACCAACCTGAAGGTGTACCACGACATCAAGGACATTACCGCCCGGAAAGAGATTATT
GAGAACGCCGAGCTGCTGGATCAGATTGCCAAGATCCTGACCATCTACCAGAGCAGCGAGGACATCCAGGAAG
AACTGACCAATCTGAACTCCGAGCTGACCCAGGAAGAGATCGAGCAGATCTCTAATCTGAAGGGCTATACCGGC
ACCCACAACCTGAGCCTGAAGGCCATCAACCTGATCCTGGACGAGCTGTGGCACACCAACGACAACCAGATCG
CTATCTTCAACCGGCTGAAGCTGGTGCCCAAGAAGGTGGACCTGTCCCAGCAGAAAGAGATCCCCACCACCCT
GGTGGACGACTTCATCCTGAGCCCCGTCGTGAAGAGAAGCTTCATCCAGAGCATCAAAGTGATCAACGCCATCA
TCAAGAAGTACGGCCTGCCCAACGACATCATTATCGAGCTGGCCCGCGAGAAGAACTCCAAGGACGCCCAGAA
AATGATCAACGAGATGCAGAAGCGGAACCGGCAGACCAACGAGCGGATCGAGGAAATCATCCGGACCACCGGC
AAAGAGAACGCCAAGTACCTGATCGAGAAGATCAAGCTGCACGACATGCAGGAAGGCAAGTGCCTGTACAGCC
TGGAAGCCATCCCTCTGGAAGATCTGCTGAACAACCCCTTCAACTATGAGGTGGACCACATCATCCCCAGAAGC
GTGTCCTTCGACAACAGCTTCAACAACAAGGTGCTCGTGAAGCAGGAAGAAGCCAGCAAGAAGGGCAACCGGA
CCCCATTCCAGTACCTGAGCAGCAGCGACAGCAAGATCAGCTACGAAACCTTCAAGAAGCACATCCTGAATCTG
GCCAAGGGCAAGGGCAGAATCAGCAAGACCAAGAAAGAGTATCTGCTGGAAGAACGGGACATCAACAGGTTCT
CCGTGCAGAAAGACTTCATCAACCGGAACCTGGTGGATACCAGATACGCCACCAGAGGCCTGATGAACCTGCT
GCGGAGCTACTTCAGAGTGAACAACCTGGACGTGAAAGTGAAGTCCATCAATGGCGGCTTCACCAGCTTTCTGC
GGCGGAAGTGGAAGTTTAAGAAAGAGCGGAACAAGGGGTACAAGCACCACGCCGAGGACGCCCTGATCATTGC
CAACGCCGATTTCATCTTCAAAGAGTGGAAGAAACTGGACAAGGCCAAAAAAGTGATGGAAAACCAGATGTTCG
AGGAAAAGCAGGCCGAGAGCATGCCCGAGATCGAAACCGAGCAGGAGTACAAAGAGATCTTCATCACCCCCCA
CCAGATCAAGCACATTAAGGACTTCAAGGACTACAAGTACAGCCACCGGGTGGACAAGAAGCCTAATAGAGAGC
TGATTAACGACACCCTGTACTCCACCCGGAAGGACGACAAGGGCAACACCCTGATCGTGAACAATCTGAACGGC
CTGTACGACAAGGACAATGACAAGCTGAAAAAGCTGATCAACAAGAGCCCCGAAAAGCTGCTGATGTACCACCA
CGACCCCCAGACCTACCAGAAACTGAAGCTGATTATGGAACAGTACGGCGACGAGAAGAATCCCCTGTACAAGT
ACTACGAGGAAACCGGGAACTACCTGACCAAGTACTCCAAAAAGGACAACGGCCCCGTGATCAAGAAGATTAAG
TATTACGGCAACAAACTGAACGCCCATCTGGACATCACCGACGACTACCCCAACAGCAGAAACAAGGTCGTGAA
GCTGTCCCTGAAGCCCTACAGATTCGACGTGTACCTGGACAATGGCGTGTACAAGTTCGTGACCGTGAAGAATC
TGGATGTGATCAAAAAAGAAAACTACTACGAAGTGAATAGCAAGTGCTATGAGGAAGCTAAGAAGCTGAAGAAGA
TCAGCAACCAGGCCGAGTTTATCGCCTCCTTCTACAACAACGATCTGATCAAGATCAACGGCGAGCTGTATAGA
GTGATCGGCGTGAACAACGACCTGCTGAACCGGATCGAAGTGAACATGATCGACATCACCTACCGCGAGTACCT
GGAAAACATGAACGACAAGAGGCCCCCCAGGATCATTAAGACAATCGCCTCCAAGACCCAGAGCATTAAGAAGT
ACAGCACAGACATTCTGGGCAACCTGTATGAAGTGAAATCTAAGAAGCACCCTCAGATCATCAAAAAGGGCAAAA
GGCCGGCGGCCACGAAAAAGGCCGGCCAGGCAAAAAAGAAAAAGGGATCCGGACGGGCTGACGCATTGGACG
ATTTTGATCTGGATATGCTGGGAAGTGACGCCCTCGATGATTTTGACCTTGACATGCTTGGTTCGGATGCCCTTG
ATGACTTTGACCTCGACATGCTCGGCAGTGACGCCCTTGATGATTTCGACCTGGACATGCTGATTAACTGTACAG
GCAGTGGAGAGGGCAGAGGAAGTCTGCTAACATGCGGTGACGTCGAGGAGAATCCTGGCCCAATGGCCAAGC
CTTTGTCTCAAGAAGAATCCACCCTCATTGAAAGAGCAACGGCTACAATCAACAGCATCCCCATCTCTGAAGACT
ACAGCGTCGCCAGCGCAGCTCTCTCTAGCGACGGCCGCATCTTCACTGGTGTCAATGTATATCATTTTACTGGG
GGACCTTGTGCAGAACTCGTGGTGCTGGGCACTGCTGCTGCTGCGGCAGCTGGCAACCTGACTTGTATCGTCG
CGATCGGAAATGAGAACAGGGGCATCTTGAGCCCCTGCGGACGGTGCCGACAGGTGCTTCTCGATCTGCATCC
TGGGATCAAAGCCATAGTGAAGGACAGTGATGGACAGCCGACGGCAGTTGGGATTCGTGAATTGCTGCCCTCT
GGTTATGTGTGGGAGGGCTAAGAATTCCTAGAGCTCGCTGATCAGCCTCGACTGTGCCTTCTAGTTGCCAGCCA
TCTGTTGTTTGCCCCTCCCCCGTGCCTTCCTTGACCCTGGAAGGTGCCACTCCCACTGTCCTTTCCTAATAAAAT
GAGGAAATTGCATCGCATTGTCTGAGTAGGTGTCATTCTATTCTGGGGGGTGGGGTGGGGCAGGACAGCAAGG
GGGAGGATTGGGAAGAGAATAGCAGGCATGCTGGGGAGGTACCGAGGGCCTATTTCCCATGATTCCTTCATATT
TGCATATACGATACAAGGCTGTTAGAGAGATAATTGGAATTAATTTGACTGTAAACACAAAGATATTAGTACAAAA
TACGTGACGTAGAAAGTAATAATTTCTTGGGTAGTTTGCAGTTTTAAAATTATGTTTTAAAATGGACTATCATATGC
TTACCGTAACTTGAAAGTATTTCGATTTCTTGGCTTTATATATCTTGTGGAAAGGACGAAAcaccgACCTGTGAGGT
GCTGCGAGGgTTTTAGTACTCTGGAAACAGAATCTACTAAAACAAGGCAAAATGCCGTGTTTATCTCGTCAACTT
GTTGGCGAGATTTTTGCGGCCGCAGGAACCCCTAGTGATGGAGTTGGCCACTCCCTCTCTGCGCGCTCGCTCG
CTCACTGAGGCCGGGCGACCAAAGGTCGCCCGACGCCCGGGCTTTGCCCGGGCGGCCTCAGTGAGCGAGCG
AGCGCGCAGCTGCCTGCAGGGGCGCCTGATGCGGTATTTTCTCCTTACGCATCTGTGCGGTATTTCACACCGCA
TACGTCAAAGCAACCATAGTACGCGCCCTGTAGCGGCGCATTAAGCGCGGCGGGTGTGGTGGTTACGCGCAGC
GTGACCGCTACACTTGCCAGCGCCTTAGCGCCCGCTCCTTTCGCTTTCTTCCCTTCCTTTCTCGCCACGTTCGC
CGGCTTTCCCCGTCAAGCTCTAAATCGGGGGCTCCCTTTAGGGTTCCGATTTAGTGCTTTACGGCACCTCGACC
CCAAAAAACTTGATTTGGGTGATGGTTCACGTAGTGGGCCATCGCCCTGATAGACGGTTTTTCGCCCTTTGACGT
TGGAGTCCACGTTCTTTAATAGTGGACTCTTGTTCCAAACTGGAACAACACTCAACTCTATCTCGGGCTATTCTTT
TGATTTATAAGGGATTTTGCCGATTTCGGTCTATTGGTTAAAAAATGAGCTGATTTAACAAAAATTTAACGCGAATT
TTAACAAAATATTAACGTTTACAATTTTATGGTGCACTCTCAGTACAATCTGCTCTGATGCCGCATAGTTAAGCCA
GCCCCGACACCCGCCAACACCCGCTGACGCGCCCTGACGGGCTTGTCTGCTCCCGGCATCCGCTTACAGACAA
GCTGTGACCGTCTCCGGGAGCTGCATGTGTCAGAGGTTTTCACCGTCATCACCGAAACGCGCGAGACGAAAGG
GCCTCGTGATACGCCTATTTTTATAGGTTAATGTCATGATAATAATGGTTTCTTAGACGTCAGGTGGCACTTTTCG
GGGAAATGTGCGCGGAACCCCTATTTGTTTATTTTTCTAAATACATTCAAATATGTATCCGCTCATGAGACAATAA
CCCTGATAAATGCTTCAATAATATTGAAAAAGGAAGAGTATGAGTATTCAACATTTCCGTGTCGCCCTTATTCCCT
TTTTTGCGGCATTTTGCCTTCCTGTTTTTGCTCACCCAGAAACGCTGGTGAAAGTAAAAGATGCTGAAGATCAGTT
GGGTGCACGAGTGGGTTACATCGAACTGGATCTCAACAGCGGTAAGATCCTTGAGAGTTTTCGCCCCGAAGAAC
GTTTTCCAATGATGAGCACTTTTAAAGTTCTGCTATGTGGCGCGGTATTATCCCGTATTGACGCCGGGCAAGAGC
AACTCGGTCGCCGCATACACTATTCTCAGAATGACTTGGTTGAGTACTCACCAGTCACAGAAAAGCATCTTACGG
ATGGCATGACAGTAAGAGAATTATGCAGTGCTGCCATAACCATGAGTGATAACACTGCGGCCAACTTACTTCTGA
CAACGATCGGAGGACCGAAGGAGCTAACCGCTTTTTTGCACAACATGGGGGATCATGTAACTCGCCTTGATCGT
TGGGAACCGGAGCTGAATGAAGCCATACCAAACGACGAGCGTGACACCACGATGCCTGTAGCAATGGCAACAA
CGTTGCGCAAACTATTAACTGGCGAACTACTTACTCTAGCTTCCCGGCAACAATTAATAGACTGGATGGAGGCG
GATAAAGTTGCAGGACCACTTCTGCGCTCGGCCCTTCCGGCTGGCTGGTTTATTGCTGATAAATCTGGAGCCGG
TGAGCGTGGAAGCCGCGGTATCATTGCAGCACTGGGGCCAGATGGTAAGCCCTCCCGTATCGTAGTTATCTACA
CGACGGGGAGTCAGGCAACTATGGATGAACGAAATAGACAGATCGCTGAGATAGGTGCCTCACTGATTAAGCAT
TGGTAACTGTCAGACCAAGTTTACTCATATATACTTTAGATTGATTTAAAACTTCATTTTTAATTTAAAAGGATCTAG
GTGAAGATCCTTTTTGATAATCTCATGACCAAAATCCCTTAACGTGAGTTTTCGTTCCACTGAGCGTCAGACCCC
GTAGAAAAGATCAAAGGATCTTCTTGAGATCCTTTTTTTCTGCGCGTAATCTGCTGCTTGCAAACAAAAAAACCAC
CGCTACCAGCGGTGGTTTGTTTGCCGGATCAAGAGCTACCAACTCTTTTTCCGAAGGTAACTGGCTTCAGCAGA
GCGCAGATACCAAATACTGTTCTTCTAGTGTAGCCGTAGTTAGGCCACCACTTCAAGAACTCTGTAGCACCGCCT
ACATACCTCGCTCTGCTAATCCTGTTACCAGTGGCTGCTGCCAGTGGCGATAAGTCGTGTCTTACCGGGTTGGA
CTCAAGACGATAGTTACCGGATAAGGCGCAGCGGTCGGGCTGAACGGGGGGTTCGTGCACACAGCCCAGCTTG
GAGCGAACGACCTACACCGAACTGAGATACCTACAGCGTGAGCTATGAGAAAGCGCCACGCTTCCCGAAGGGA
GAAAGGCGGACAGGTATCCGGTAAGCGGCAGGGTCGGAACAGGAGAGCGCACGAGGGAGCTTCCAGGGGGA
AACGCCTGGTATCTTTATAGTCCTGTCGGGTTTCGCCACCTCTGACTTGAGCGTCGATTTTTGTGATGCTCGTCA
GGGGGGCGGAGCCTATGGAAAAACGCCAGCAACGCGGCCTTTTTACGGTTCCTGGCCTTTTGCTGGCCTTTTG
CTCACATGT
1.5 KCNQ2
Nucleotide sequence of sasgRNA for mouse KCNQ2; sgRNA1 (SEQ ID NO: 75)
CCTCAAGGATTACCGGGCTAG
Nucleotide sequence of sasgRNA for mouse KCNQ2; sgRNA2 (SEQ ID NO: 76)
CTAGCCCGGTAATCCTTGAGG
Nucleotide sequence of sasgRNA for mouse KCNQ2; sgRNA3 (SEQ ID NO: 77)
GGCAGGGCTGGACTCCCCCTC
Nucleotide sequence of sasgRNA for mouse KCNQ2; sgRNA4 (SEQ ID NO: 78)
CTAGCCCGGTAATCCTTGAGG
Nucleotide sequence of sasgRNA for mouse KCNQ2; sgRNA5 (SEQ ID NO: 79)
GGCAGGGCTGGACTCCCCCTC
Nucleotide sequence of sasgRNA for mouse KCNQ2; sgRNA6 (SEQ ID NO: 80)
TCCTAGCCCGGTAATCCTTGA
pAAV-CMV-sadCas9-U6gRNA(Kcnq2-sa_sgRNA1) used in in vitro qPCR experiments (SEQ ID NO: 81)
CCTGCAGGCAGCTGCGCGCTCGCTCGCTCACTGAGGCCGCCCGGGCGTCGGGCGACCTTTGGTCGCCCGGCC
TCAGTGAGCGAGCGAGCGCGCAGAGAGGGAGTGGCCAACTCCATCACTAGGGGTTCCTGCGGCCTCTAGACTC
GAGGCGTTGACATTGATTATTGACTAGTTATTAATAGTAATCAATTACGGGGTCATTAGTTCATAGCCCATATATG
GAGTTCCGCGTTACATAACTTACGGTAAATGGCCCGCCTGGCTGACCGCCCAACGACCCCCGCCCATTGACGT
CAATAATGACGTATGTTCCCATAGTAACGCCAATAGGGACTTTCCATTGACGTCAATGGGTGGAGTATTTACGGT
AAACTGCCCACTTGGCAGTACATCAAGTGTATCATATGCCAAGTACGCCCCCTATTGACGTCAATGACGGTAAAT
GGCCCGCCTGGCATTATGCCCAGTACATGACCTTATGGGACTTTCCTACTTGGCAGTACATCTACGTATTAGTCA
TCGCTATTACCATGGTGATGCGGTTTTGGCAGTACATCAATGGGCGTGGATAGCGGTTTGACTCACGGGGATTT
CCAAGTCTCCACCCCATTGACGTCAATGGGAGTTTGTTTTGGCACCAAAATCAACGGGACTTTCCAAAATGTCGT
AACAACTCCGCCCCATTGACGCAAATGGGCGGTAGGCGTGTACGGTGGGAGGTCTATATAAGCAGAGCTCTCT
GGCTAACTACCGGTGCCACCATGGCCCCAAAGAAGAAGCGGAAGGTCGGTATCCACGGAGTCCCAGCAGCCAA
GCGGAACTACATCCTGGGCCTGGCCATCGGCATCACCAGCGTGGGCTACGGCATCATCGACTACGAGACACGG
GACGTGATCGATGCCGGCGTGCGGCTGTTCAAAGAGGCCAACGTGGAAAACAACGAGGGCAGGCGGAGCAAG
AGAGGCGCCAGAAGGCTGAAGCGGCGGAGGCGGCATAGAATCCAGAGAGTGAAGAAGCTGCTGTTCGACTAC
AACCTGCTGACCGACCACAGCGAGCTGAGCGGCATCAACCCCTACGAGGCCAGAGTGAAGGGCCTGAGCCAG
AAGCTGAGCGAGGAAGAGTTCTCTGCCGCCCTGCTGCACCTGGCCAAGAGAAGAGGCGTGCACAACGTGAACG
AGGTGGAAGAGGACACCGGCAACGAGCTGTCCACCAAAGAGCAGATCAGCCGGAACAGCAAGGCCCTGGAAG
AGAAATACGTGGCCGAACTGCAGCTGGAACGGCTGAAGAAAGACGGCGAAGTGCGGGGCAGCATCAACAGATT
CAAGACCAGCGACTACGTGAAAGAAGCCAAACAGCTGCTGAAGGTGCAGAAGGCCTACCACCAGCTGGACCAG
AGCTTCATCGACACCTACATCGACCTGCTGGAAACCCGGCGGACCTACTATGAGGGACCTGGCGAGGGCAGCC
CCTTCGGCTGGAAGGACATCAAAGAATGGTACGAGATGCTGATGGGCCACTGCACCTACTTCCCCGAGGAACT
GCGGAGCGTGAAGTACGCCTACAACGCCGACCTGTACAACGCCCTGAACGACCTGAACAATCTCGTGATCACC
AGGGACGAGAACGAGAAGCTGGAATATTACGAGAAGTTCCAGATCATCGAGAACGTGTTCAAGCAGAAGAAGAA
GCCCACCCTGAAGCAGATCGCCAAAGAAATCCTCGTGAACGAAGAGGATATTAAGGGCTACAGAGTGACCAGCA
CCGGCAAGCCCGAGTTCACCAACCTGAAGGTGTACCACGACATCAAGGACATTACCGCCCGGAAAGAGATTATT
GAGAACGCCGAGCTGCTGGATCAGATTGCCAAGATCCTGACCATCTACCAGAGCAGCGAGGACATCCAGGAAG
AACTGACCAATCTGAACTCCGAGCTGACCCAGGAAGAGATCGAGCAGATCTCTAATCTGAAGGGCTATACCGGC
ACCCACAACCTGAGCCTGAAGGCCATCAACCTGATCCTGGACGAGCTGTGGCACACCAACGACAACCAGATCG
CTATCTTCAACCGGCTGAAGCTGGTGCCCAAGAAGGTGGACCTGTCCCAGCAGAAAGAGATCCCCACCACCCT
GGTGGACGACTTCATCCTGAGCCCCGTCGTGAAGAGAAGCTTCATCCAGAGCATCAAAGTGATCAACGCCATCA
TCAAGAAGTACGGCCTGCCCAACGACATCATTATCGAGCTGGCCCGCGAGAAGAACTCCAAGGACGCCCAGAA
AATGATCAACGAGATGCAGAAGCGGAACCGGCAGACCAACGAGCGGATCGAGGAAATCATCCGGACCACCGGC
AAAGAGAACGCCAAGTACCTGATCGAGAAGATCAAGCTGCACGACATGCAGGAAGGCAAGTGCCTGTACAGCC
TGGAAGCCATCCCTCTGGAAGATCTGCTGAACAACCCCTTCAACTATGAGGTGGACCACATCATCCCCAGAAGC
GTGTCCTTCGACAACAGCTTCAACAACAAGGTGCTCGTGAAGCAGGAAGAAGCCAGCAAGAAGGGCAACCGGA
CCCCATTCCAGTACCTGAGCAGCAGCGACAGCAAGATCAGCTACGAAACCTTCAAGAAGCACATCCTGAATCTG
GCCAAGGGCAAGGGCAGAATCAGCAAGACCAAGAAAGAGTATCTGCTGGAAGAACGGGACATCAACAGGTTCT
CCGTGCAGAAAGACTTCATCAACCGGAACCTGGTGGATACCAGATACGCCACCAGAGGCCTGATGAACCTGCT
GCGGAGCTACTTCAGAGTGAACAACCTGGACGTGAAAGTGAAGTCCATCAATGGCGGCTTCACCAGCTTTCTGC
GGCGGAAGTGGAAGTTTAAGAAAGAGCGGAACAAGGGGTACAAGCACCACGCCGAGGACGCCCTGATCATTGC
CAACGCCGATTTCATCTTCAAAGAGTGGAAGAAACTGGACAAGGCCAAAAAAGTGATGGAAAACCAGATGTTCG
AGGAAAAGCAGGCCGAGAGCATGCCCGAGATCGAAACCGAGCAGGAGTACAAAGAGATCTTCATCACCCCCCA
CCAGATCAAGCACATTAAGGACTTCAAGGACTACAAGTACAGCCACCGGGTGGACAAGAAGCCTAATAGAGAGC
TGATTAACGACACCCTGTACTCCACCCGGAAGGACGACAAGGGCAACACCCTGATCGTGAACAATCTGAACGGC
CTGTACGACAAGGACAATGACAAGCTGAAAAAGCTGATCAACAAGAGCCCCGAAAAGCTGCTGATGTACCACCA
CGACCCCCAGACCTACCAGAAACTGAAGCTGATTATGGAACAGTACGGCGACGAGAAGAATCCCCTGTACAAGT
ACTACGAGGAAACCGGGAACTACCTGACCAAGTACTCCAAAAAGGACAACGGCCCCGTGATCAAGAAGATTAAG
TATTACGGCAACAAACTGAACGCCCATCTGGACATCACCGACGACTACCCCAACAGCAGAAACAAGGTCGTGAA
GCTGTCCCTGAAGCCCTACAGATTCGACGTGTACCTGGACAATGGCGTGTACAAGTTCGTGACCGTGAAGAATC
TGGATGTGATCAAAAAAGAAAACTACTACGAAGTGAATAGCAAGTGCTATGAGGAAGCTAAGAAGCTGAAGAAGA
TCAGCAACCAGGCCGAGTTTATCGCCTCCTTCTACAACAACGATCTGATCAAGATCAACGGCGAGCTGTATAGA
GTGATCGGCGTGAACAACGACCTGCTGAACCGGATCGAAGTGAACATGATCGACATCACCTACCGCGAGTACCT
GGAAAACATGAACGACAAGAGGCCCCCCAGGATCATTAAGACAATCGCCTCCAAGACCCAGAGCATTAAGAAGT
ACAGCACAGACATTCTGGGCAACCTGTATGAAGTGAAATCTAAGAAGCACCCTCAGATCATCAAAAAGGGCAAAA
GGCCGGCGGCCACGAAAAAGGCCGGCCAGGCAAAAAAGAAAAAGGGATCCGGACGGGCTGACGCATTGGACG
ATTTTGATCTGGATATGCTGGGAAGTGACGCCCTCGATGATTTTGACCTTGACATGCTTGGTTCGGATGCCCTTG
ATGACTTTGACCTCGACATGCTCGGCAGTGACGCCCTTGATGATTTCGACCTGGACATGCTGATTAACTGTACAG
GCAGTGGAGAGGGCAGAGGAAGTCTGCTAACATGCGGTGACGTCGAGGAGAATCCTGGCCCAATGGCCAAGC
CTTTGTCTCAAGAAGAATCCACCCTCATTGAAAGAGCAACGGCTACAATCAACAGCATCCCCATCTCTGAAGACT
ACAGCGTCGCCAGCGCAGCTCTCTCTAGCGACGGCCGCATCTTCACTGGTGTCAATGTATATCATTTTACTGGG
GGACCTTGTGCAGAACTCGTGGTGCTGGGCACTGCTGCTGCTGCGGCAGCTGGCAACCTGACTTGTATCGTCG
CGATCGGAAATGAGAACAGGGGCATCTTGAGCCCCTGCGGACGGTGCCGACAGGTGCTTCTCGATCTGCATCC
TGGGATCAAAGCCATAGTGAAGGACAGTGATGGACAGCCGACGGCAGTTGGGATTCGTGAATTGCTGCCCTCT
GGTTATGTGTGGGAGGGCTAAGAATTCCTAGAGCTCGCTGATCAGCCTCGACTGTGCCTTCTAGTTGCCAGCCA
TCTGTTGTTTGCCCCTCCCCCGTGCCTTCCTTGACCCTGGAAGGTGCCACTCCCACTGTCCTTTCCTAATAAAAT
GAGGAAATTGCATCGCATTGTCTGAGTAGGTGTCATTCTATTCTGGGGGGGGGGTGGGGCAGGACAGCAAGG
GGGAGGATTGGGAAGAGAATAGCAGGCATGCTGGGGAGGTACCGAGGGCCTATTTCCCATGATTCCTTCATATT
TGCATATACGATACAAGGCTGTTAGAGAGATAATTGGAATTAATTTGACTGTAAACACAAAGATATTAGTACAAAA
TACGTGACGTAGAAAGTAATAATTTCTTGGGTAGTTTGCAGTTTTAAAATTATGTTTTAAAATGGACTATCATATGC
TTACCGTAACTTGAAAGTATTTCGATTTCTTGGCTTTATATATCTTGTGGAAAGGACGAAAcaccgCCTCAAGGATT
ACCGGGCTAGgTTTTAGTACTCTGGAAACAGAATCTACTAAAACAAGGCAAAATGCCGTGTTTATCTCGTCAACTT
GTTGGCGAGATTTTTGCGGCCGCAGGAACCCCTAGTGATGGAGTTGGCCACTCCCTCTCTGCGCGCTCGCTCG
CTCACTGAGGCCGGGCGACCAAAGGTCGCCCGACGCCCGGGCTTTGCCCGGGCGGCCTCAGTGAGCGAGCG
AGCGCGCAGCTGCCTGCAGGGGCGCCTGATGCGGTATTTTCTCCTTACGCATCTGTGCGGTATTTCACACCGCA
TACGTCAAAGCAACCATAGTACGCGCCCTGTAGCGGCGCATTAAGCGCGGCGGGTGTGGTGGTTACGCGCAGC
GTGACCGCTACACTTGCCAGCGCCTTAGCGCCCGCTCCTTTCGCTTTCTTCCCTTCCTTTCTCGCCACGTTCGC
CGGCTTTCCCCGTCAAGCTCTAAATCGGGGGCTCCCTTTAGGGTTCCGATTTAGTGCTTTACGGCACCTCGACC
CCAAAAAACTTGATTTGGGTGATGGTTCACGTAGTGGGCCATCGCCCTGATAGACGGTTTTTCGCCCTTTGACGT
TGGAGTCCACGTTCTTTAATAGTGGACTCTTGTTCCAAACTGGAACAACACTCAACTCTATCTCGGGCTATTCTTT
TGATTTATAAGGGATTTTGCCGATTTCGGTCTATTGGTTAAAAAATGAGCTGATTTAACAAAAATTTAACGCGAATT
TTAACAAAATATTAACGTTTACAATTTTATGGTGCACTCTCAGTACAATCTGCTCTGATGCCGCATAGTTAAGCCA
GCCCCGACACCCGCCAACACCCGCTGACGCGCCCTGACGGGCTTGTCTGCTCCCGGCATCCGCTTACAGACAA
GCTGTGACCGTCTCCGGGAGCTGCATGTGTCAGAGGTTTTCACCGTCATCACCGAAACGCGCGAGACGAAAGG
GCCTCGTGATACGCCTATTTTTATAGGTTAATGTCATGATAATAATGGTTTCTTAGACGTCAGGTGGCACTTTTCG
GGGAAATGTGCGCGGAACCCCTATTTGTTTATTTTTCTAAATACATTCAAATATGTATCCGCTCATGAGACAATAA
CCCTGATAAATGCTTCAATAATATTGAAAAAGGAAGAGTATGAGTATTCAACATTTCCGTGTCGCCCTTATTCCCT
TTTTTGCGGCATTTTGCCTTCCTGTTTTTGCTCACCCAGAAACGCTGGTGAAAGTAAAAGATGCTGAAGATCAGTT
GGGTGCACGAGTGGGTTACATCGAACTGGATCTCAACAGCGGTAAGATCCTTGAGAGTTTTCGCCCCGAAGAAC
GTTTTCCAATGATGAGCACTTTTAAAGTTCTGCTATGTGGCGCGGTATTATCCCGTATTGACGCCGGGCAAGAGC
AACTCGGTCGCCGCATACACTATTCTCAGAATGACTTGGTTGAGTACTCACCAGTCACAGAAAAGCATCTTACGG
ATGGCATGACAGTAAGAGAATTATGCAGTGCTGCCATAACCATGAGTGATAACACTGCGGCCAACTTACTTCTGA
CAACGATCGGAGGACCGAAGGAGCTAACCGCTTTTTTGCACAACATGGGGGATCATGTAACTCGCCTTGATCGT
TGGGAACCGGAGCTGAATGAAGCCATACCAAACGACGAGCGTGACACCACGATGCCTGTAGCAATGGCAACAA
CGTTGCGCAAACTATTAACTGGCGAACTACTTACTCTAGCTTCCCGGCAACAATTAATAGACTGGATGGAGGCG
GATAAAGTTGCAGGACCACTTCTGCGCTCGGCCCTTCCGGCTGGCTGGTTTATTGCTGATAAATCTGGAGCCGG
TGAGCGTGGAAGCCGCGGTATCATTGCAGCACTGGGGCCAGATGGTAAGCCCTCCCGTATCGTAGTTATCTACA
CGACGGGGAGTCAGGCAACTATGGATGAACGAAATAGACAGATCGCTGAGATAGGTGCCTCACTGATTAAGCAT
TGGTAACTGTCAGACCAAGTTTACTCATATATACTTTAGATTGATTTAAAACTTCATTTTTAATTTAAAAGGATCTAG
GTGAAGATCCTTTTTGATAATCTCATGACCAAAATCCCTTAACGTGAGTTTTCGTTCCACTGAGCGTCAGACCCC
GTAGAAAAGATCAAAGGATCTTCTTGAGATCCTTTTTTTCTGCGCGTAATCTGCTGCTTGCAAACAAAAAAACCAC
CGCTACCAGCGGTGGTTTGTTTGCCGGATCAAGAGCTACCAACTCTTTTTCCGAAGGTAACTGGCTTCAGCAGA
GCGCAGATACCAAATACTGTTCTTCTAGTGTAGCCGTAGTTAGGCCACCACTTCAAGAACTCTGTAGCACCGCCT
ACATACCTCGCTCTGCTAATCCTGTTACCAGTGGCTGCTGCCAGTGGCGATAAGTCGTGTCTTACCGGGTTGGA
CTCAAGACGATAGTTACCGGATAAGGCGCAGCGGTCGGGCTGAACGGGGGGTTCGTGCACACAGCCCAGCTTG
GAGCGAACGACCTACACCGAACTGAGATACCTACAGCGTGAGCTATGAGAAAGCGCCACGCTTCCCGAAGGGA
GAAAGGCGGACAGGTATCCGGTAAGCGGCAGGGTCGGAACAGGAGAGCGCACGAGGGAGCTTCCAGGGGGA
AACGCCTGGTATCTTTATAGTCCTGTCGGGTTTCGCCACCTCTGACTTGAGCGTCGATTTTTGTGATGCTCGTCA
GGGGGGCGGAGCCTATGGAAAAACGCCAGCAACGCGGCCTTTTTACGGTTCCTGGCCTTTTGCTGGCCTTTTG
CTCACATGT
pAAV-CMV-sadCas9-U6gRNA(Kcnq2-sa_sgRNA2) used in in vitro qPCR experiments (SEQ ID NO: 82)
CCTGCAGGCAGCTGCGCGCTCGCTCGCTCACTGAGGCCGCCCGGGCGTCGGGCGACCTTTGGTCGCCCGGCC
TCAGTGAGCGAGCGAGCGCGCAGAGAGGGAGTGGCCAACTCCATCACTAGGGGTTCCTGCGGCCTCTAGACTC
GAGGCGTTGACATTGATTATTGACTAGTTATTAATAGTAATCAATTACGGGGTCATTAGTTCATAGCCCATATATG
GAGTTCCGCGTTACATAACTTACGGTAAATGGCCCGCCTGGCTGACCGCCCAACGACCCCCGCCCATTGACGT
CAATAATGACGTATGTTCCCATAGTAACGCCAATAGGGACTTTCCATTGACGTCAATGGGTGGAGTATTTACGGT
AAACTGCCCACTTGGCAGTACATCAAGTGTATCATATGCCAAGTACGCCCCCTATTGACGTCAATGACGGTAAAT
GGCCCGCCTGGCATTATGCCCAGTACATGACCTTATGGGACTTTCCTACTTGGCAGTACATCTACGTATTAGTCA
TCGCTATTACCATGGTGATGCGGTTTTGGCAGTACATCAATGGGCGTGGATAGCGGTTTGACTCACGGGGATTT
CCAAGTCTCCACCCCATTGACGTCAATGGGAGTTTGTTTTGGCACCAAAATCAACGGGACTTTCCAAAATGTCGT
AACAACTCCGCCCCATTGACGCAAATGGGCGGTAGGCGTGTACGGTGGGAGGTCTATATAAGCAGAGCTCTCT
GGCTAACTACCGGTGCCACCATGGCCCCAAAGAAGAAGCGGAAGGTCGGTATCCACGGAGTCCCAGCAGCCAA
GCGGAACTACATCCTGGGCCTGGCCATCGGCATCACCAGCGTGGGCTACGGCATCATCGACTACGAGACACGG
GACGTGATCGATGCCGGCGTGCGGCTGTTCAAAGAGGCCAACGTGGAAAACAACGAGGGCAGGCGGAGCAAG
AGAGGCGCCAGAAGGCTGAAGCGGCGGAGGCGGCATAGAATCCAGAGAGTGAAGAAGCTGCTGTTCGACTAC
AACCTGCTGACCGACCACAGCGAGCTGAGCGGCATCAACCCCTACGAGGCCAGAGTGAAGGGCCTGAGCCAG
AAGCTGAGCGAGGAAGAGTTCTCTGCCGCCCTGCTGCACCTGGCCAAGAGAAGAGGCGTGCACAACGTGAACG
AGGTGGAAGAGGACACCGGCAACGAGCTGTCCACCAAAGAGCAGATCAGCCGGAACAGCAAGGCCCTGGAAG
AGAAATACGTGGCCGAACTGCAGCTGGAACGGCTGAAGAAAGACGGCGAAGTGCGGGGCAGCATCAACAGATT
CAAGACCAGCGACTACGTGAAAGAAGCCAAACAGCTGCTGAAGGTGCAGAAGGCCTACCACCAGCTGGACCAG
AGCTTCATCGACACCTACATCGACCTGCTGGAAACCCGGCGGACCTACTATGAGGGACCTGGCGAGGGCAGCC
CCTTCGGCTGGAAGGACATCAAAGAATGGTACGAGATGCTGATGGGCCACTGCACCTACTTCCCCGAGGAACT
GCGGAGCGTGAAGTACGCCTACAACGCCGACCTGTACAACGCCCTGAACGACCTGAACAATCTCGTGATCACC
AGGGACGAGAACGAGAAGCTGGAATATTACGAGAAGTTCCAGATCATCGAGAACGTGTTCAAGCAGAAGAAGAA
GCCCACCCTGAAGCAGATCGCCAAAGAAATCCTCGTGAACGAAGAGGATATTAAGGGCTACAGAGTGACCAGCA
CCGGCAAGCCCGAGTTCACCAACCTGAAGGTGTACCACGACATCAAGGACATTACCGCCCGGAAAGAGATTATT
GAGAACGCCGAGCTGCTGGATCAGATTGCCAAGATCCTGACCATCTACCAGAGCAGCGAGGACATCCAGGAAG
AACTGACCAATCTGAACTCCGAGCTGACCCAGGAAGAGATCGAGCAGATCTCTAATCTGAAGGGCTATACCGGC
ACCCACAACCTGAGCCTGAAGGCCATCAACCTGATCCTGGACGAGCTGTGGCACACCAACGACAACCAGATCG
CTATCTTCAACCGGCTGAAGCTGGTGCCCAAGAAGGTGGACCTGTCCCAGCAGAAAGAGATCCCCACCACCCT
GGTGGACGACTTCATCCTGAGCCCCGTCGTGAAGAGAAGCTTCATCCAGAGCATCAAAGTGATCAACGCCATCA
TCAAGAAGTACGGCCTGCCCAACGACATCATTATCGAGCTGGCCCGCGAGAAGAACTCCAAGGACGCCCAGAA
AATGATCAACGAGATGCAGAAGCGGAACCGGCAGACCAACGAGCGGATCGAGGAAATCATCCGGACCACCGGC
AAAGAGAACGCCAAGTACCTGATCGAGAAGATCAAGCTGCACGACATGCAGGAAGGCAAGTGCCTGTACAGCC
TGGAAGCCATCCCTCTGGAAGATCTGCTGAACAACCCCTTCAACTATGAGGTGGACCACATCATCCCCAGAAGC
GTGTCCTTCGACAACAGCTTCAACAACAAGGTGCTCGTGAAGCAGGAAGAAGCCAGCAAGAAGGGCAACCGGA
CCCCATTCCAGTACCTGAGCAGCAGCGACAGCAAGATCAGCTACGAAACCTTCAAGAAGCACATCCTGAATCTG
GCCAAGGGCAAGGGCAGAATCAGCAAGACCAAGAAAGAGTATCTGCTGGAAGAACGGGACATCAACAGGTTCT
CCGTGCAGAAAGACTTCATCAACCGGAACCTGGTGGATACCAGATACGCCACCAGAGGCCTGATGAACCTGCT
GCGGAGCTACTTCAGAGTGAACAACCTGGACGTGAAAGTGAAGTCCATCAATGGCGGCTTCACCAGCTTTCTGC
GGCGGAAGTGGAAGTTTAAGAAAGAGCGGAACAAGGGGTACAAGCACCACGCCGAGGACGCCCTGATCATTGC
CAACGCCGATTTCATCTTCAAAGAGTGGAAGAAACTGGACAAGGCCAAAAAAGTGATGGAAAACCAGATGTTCG
AGGAAAAGCAGGCCGAGAGCATGCCCGAGATCGAAACCGAGCAGGAGTACAAAGAGATCTTCATCACCCCCCA
CCAGATCAAGCACATTAAGGACTTCAAGGACTACAAGTACAGCCACCGGGTGGACAAGAAGCCTAATAGAGAGC
TGATTAACGACACCCTGTACTCCACCCGGAAGGACGACAAGGGCAACACCCTGATCGTGAACAATCTGAACGGC
CTGTACGACAAGGACAATGACAAGCTGAAAAAGCTGATCAACAAGAGCCCCGAAAAGCTGCTGATGTACCACCA
CGACCCCCAGACCTACCAGAAACTGAAGCTGATTATGGAACAGTACGGCGACGAGAAGAATCCCCTGTACAAGT
ACTACGAGGAAACCGGGAACTACCTGACCAAGTACTCCAAAAAGGACAACGGCCCCGTGATCAAGAAGATTAAG
TATTACGGCAACAAACTGAACGCCCATCTGGACATCACCGACGACTACCCCAACAGCAGAAACAAGGTCGTGAA
GCTGTCCCTGAAGCCCTACAGATTCGACGTGTACCTGGACAATGGCGTGTACAAGTTCGTGACCGTGAAGAATC
TGGATGTGATCAAAAAAGAAAACTACTACGAAGTGAATAGCAAGTGCTATGAGGAAGCTAAGAAGCTGAAGAAGA
TCAGCAACCAGGCCGAGTTTATCGCCTCCTTCTACAACAACGATCTGATCAAGATCAACGGCGAGCTGTATAGA
GTGATCGGCGTGAACAACGACCTGCTGAACCGGATCGAAGTGAACATGATCGACATCACCTACCGCGAGTACCT
GGAAAACATGAACGACAAGAGGCCCCCCAGGATCATTAAGACAATCGCCTCCAAGACCCAGAGCATTAAGAAGT
ACAGCACAGACATTCTGGGCAACCTGTATGAAGTGAAATCTAAGAAGCACCCTCAGATCATCAAAAAGGGCAAAA
GGCCGGCGGCCACGAAAAAGGCCGGCCAGGCAAAAAAGAAAAAGGGATCCGGACGGGCTGACGCATTGGACG
ATTTTGATCTGGATATGCTGGGAAGTGACGCCCTCGATGATTTTGACCTTGACATGCTTGGTTCGGATGCCCTTG
ATGACTTTGACCTCGACATGCTCGGCAGTGACGCCCTTGATGATTTCGACCTGGACATGCTGATTAACTGTACAG
GCAGTGGAGAGGGCAGAGGAAGTCTGCTAACATGCGGTGACGTCGAGGAGAATCCTGGCCCAATGGCCAAGC
CTTTGTCTCAAGAAGAATCCACCCTCATTGAAAGAGCAACGGCTACAATCAACAGCATCCCCATCTCTGAAGACT
ACAGCGTCGCCAGCGCAGCTCTCTCTAGCGACGGCCGCATCTTCACTGGTGTCAATGTATATCATTTTACTGGG
GGACCTTGTGCAGAACTCGTGGTGCTGGGCACTGCTGCTGCTGCGGCAGCTGGCAACCTGACTTGTATCGTCG
CGATCGGAAATGAGAACAGGGGCATCTTGAGCCCCTGCGGACGGTGCCGACAGGTGCTTCTCGATCTGCATCC
TGGGATCAAAGCCATAGTGAAGGACAGTGATGGACAGCCGACGGCAGTTGGGATTCGTGAATTGCTGCCCTCT
GGTTATGTGTGGGAGGGCTAAGAATTCCTAGAGCTCGCTGATCAGCCTCGACTGTGCCTTCTAGTTGCCAGCCA
TCTGTTGTTTGCCCCTCCCCCGTGCCTTCCTTGACCCTGGAAGGTGCCACTCCCACTGTCCTTTCCTAATAAAAT
GAGGAAATTGCATCGCATTGTCTGAGTAGGTGTCATTCTATTCTGGGGGGTGGGGTGGGGCAGGACAGCAAGG
GGGAGGATTGGGAAGAGAATAGCAGGCATGCTGGGGAGGTACCGAGGGCCTATTTCCCATGATTCCTTCATATT
TGCATATACGATACAAGGCTGTTAGAGAGATAATTGGAATTAATTTGACTGTAAACACAAAGATATTAGTACAAAA
TACGTGACGTAGAAAGTAATAATTTCTTGGGTAGTTTGCAGTTTTAAAATTATGTTTTAAAATGGACTATCATATGC
TTACCGTAACTTGAAAGTATTTCGATTTCTTGGCTTTATATATCTTGTGGAAAGGACGAAAcaccgCTAGCCCGGTA
ATCCTTGAGGgTTTTAGTACTCTGGAAACAGAATCTACTAAAACAAGGCAAAATGCCGTGTTTATCTCGTCAACTT
GTTGGCGAGATTTTTGCGGCCGCAGGAACCCCTAGTGATGGAGTTGGCCACTCCCTCTCTGCGCGCTCGCTCG
CTCACTGAGGCCGGGCGACCAAAGGTCGCCCGACGCCCGGGCTTTGCCCGGGCGGCCTCAGTGAGCGAGCG
AGCGCGCAGCTGCCTGCAGGGGCGCCTGATGCGGTATTTTCTCCTTACGCATCTGTGCGGTATTTCACACCGCA
TACGTCAAAGCAACCATAGTACGCGCCCTGTAGCGGCGCATTAAGCGCGGCGGGTGTGGTGGTTACGCGCAGC
GTGACCGCTACACTTGCCAGCGCCTTAGCGCCCGCTCCTTTCGCTTTCTTCCCTTCCTTTCTCGCCACGTTCGC
CGGCTTTCCCCGTCAAGCTCTAAATCGGGGGCTCCCTTTAGGGTTCCGATTTAGTGCTTTACGGCACCTCGACC
CCAAAAAACTTGATTTGGGTGATGGTTCACGTAGTGGGCCATCGCCCTGATAGACGGTTTTTCGCCCTTTGACGT
TGGAGTCCACGTTCTTTAATAGTGGACTCTTGTTCCAAACTGGAACAACACTCAACTCTATCTCGGGCTATTCTTT
TGATTTATAAGGGATTTTGCCGATTTCGGTCTATTGGTTAAAAAATGAGCTGATTTAACAAAAATTTAACGCGAATT
TTAACAAAATATTAACGTTTACAATTTTATGGTGCACTCTCAGTACAATCTGCTCTGATGCCGCATAGTTAAGCCA
GCCCCGACACCCGCCAACACCCGCTGACGCGCCCTGACGGGCTTGTCTGCTCCCGGCATCCGCTTACAGACAA
GCTGTGACCGTCTCCGGGAGCTGCATGTGTCAGAGGTTTTCACCGTCATCACCGAAACGCGCGAGACGAAAGG
GCCTCGTGATACGCCTATTTTTATAGGTTAATGTCATGATAATAATGGTTTCTTAGACGTCAGGTGGCACTTTTCG
GGGAAATGTGCGCGGAACCCCTATTTGTTTATTTTTCTAAATACATTCAAATATGTATCCGCTCATGAGACAATAA
CCCTGATAAATGCTTCAATAATATTGAAAAAGGAAGAGTATGAGTATTCAACATTTCCGTGTCGCCCTTATTCCCT
TTTTTGCGGCATTTTGCCTTCCTGTTTTTGCTCACCCAGAAACGCTGGTGAAAGTAAAAGATGCTGAAGATCAGTT
GGGTGCACGAGTGGGTTACATCGAACTGGATCTCAACAGCGGTAAGATCCTTGAGAGTTTTCGCCCCGAAGAAC
GTTTTCCAATGATGAGCACTTTTAAAGTTCTGCTATGTGGCGCGGTATTATCCCGTATTGACGCCGGGCAAGAGC
AACTCGGTCGCCGCATACACTATTCTCAGAATGACTTGGTTGAGTACTCACCAGTCACAGAAAAGCATCTTACGG
ATGGCATGACAGTAAGAGAATTATGCAGTGCTGCCATAACCATGAGTGATAACACTGCGGCCAACTTACTTCTGA
CAACGATCGGAGGACCGAAGGAGCTAACCGCTTTTTTGCACAACATGGGGGATCATGTAACTCGCCTTGATCGT
TGGGAACCGGAGCTGAATGAAGCCATACCAAACGACGAGCGTGACACCACGATGCCTGTAGCAATGGCAACAA
CGTTGCGCAAACTATTAACTGGCGAACTACTTACTCTAGCTTCCCGGCAACAATTAATAGACTGGATGGAGGCG
GATAAAGTTGCAGGACCACTTCTGCGCTCGGCCCTTCCGGCTGGCTGGTTTATTGCTGATAAATCTGGAGCCGG
TGAGCGTGGAAGCCGCGGTATCATTGCAGCACTGGGGCCAGATGGTAAGCCCTCCCGTATCGTAGTTATCTACA
CGACGGGGAGTCAGGCAACTATGGATGAACGAAATAGACAGATCGCTGAGATAGGTGCCTCACTGATTAAGCAT
TGGTAACTGTCAGACCAAGTTTACTCATATATACTTTAGATTGATTTAAAACTTCATTTTTAATTTAAAAGGATCTAG
GTGAAGATCCTTTTTGATAATCTCATGACCAAAATCCCTTAACGTGAGTTTTCGTTCCACTGAGCGTCAGACCCC
GTAGAAAAGATCAAAGGATCTTCTTGAGATCCTTTTTTTCTGCGCGTAATCTGCTGCTTGCAAACAAAAAAACCAC
CGCTACCAGCGGTGGTTTGTTTGCCGGATCAAGAGCTACCAACTCTTTTTCCGAAGGTAACTGGCTTCAGCAGA
GCGCAGATACCAAATACTGTTCTTCTAGTGTAGCCGTAGTTAGGCCACCACTTCAAGAACTCTGTAGCACCGCCT
ACATACCTCGCTCTGCTAATCCTGTTACCAGTGGCTGCTGCCAGTGGCGATAAGTCGTGTCTTACCGGGTTGGA
CTCAAGACGATAGTTACCGGATAAGGCGCAGCGGTCGGGCTGAACGGGGGGTTCGTGCACACAGCCCAGCTTG
GAGCGAACGACCTACACCGAACTGAGATACCTACAGCGTGAGCTATGAGAAAGCGCCACGCTTCCCGAAGGGA
GAAAGGCGGACAGGTATCCGGTAAGCGGCAGGGTCGGAACAGGAGAGCGCACGAGGGAGCTTCCAGGGGGA
AACGCCTGGTATCTTTATAGTCCTGTCGGGTTTCGCCACCTCTGACTTGAGCGTCGATTTTTGTGATGCTCGTCA
GGGGGGCGGAGCCTATGGAAAAACGCCAGCAACGCGGCCTTTTTACGGTTCCTGGCCTTTTGCTGGCCTTTTG
CTCACATGT
pAAV-CMV-sadCas9-U6gRNA(Kcnq2-sa_sgRNA3) used in in vitro qPCR experiments (SEQ ID NO: 83)
CCTGCAGGCAGCTGCGCGCTCGCTCGCTCACTGAGGCCGCCCGGGCGTCGGGCGACCTTTGGTCGCCCGGCC
TCAGTGAGCGAGCGAGCGCGCAGAGAGGGAGTGGCCAACTCCATCACTAGGGGTTCCTGCGGCCTCTAGACTC
GAGGCGTTGACATTGATTATTGACTAGTTATTAATAGTAATCAATTACGGGGTCATTAGTTCATAGCCCATATATG
GAGTTCCGCGTTACATAACTTACGGTAAATGGCCCGCCTGGCTGACCGCCCAACGACCCCCGCCCATTGACGT
CAATAATGACGTATGTTCCCATAGTAACGCCAATAGGGACTTTCCATTGACGTCAATGGGTGGAGTATTTACGGT
AAACTGCCCACTTGGCAGTACATCAAGTGTATCATATGCCAAGTACGCCCCCTATTGACGTCAATGACGGTAAAT
GGCCCGCCTGGCATTATGCCCAGTACATGACCTTATGGGACTTTCCTACTTGGCAGTACATCTACGTATTAGTCA
TCGCTATTACCATGGTGATGCGGTTTTGGCAGTACATCAATGGGCGTGGATAGCGGTTTGACTCACGGGGATTT
CCAAGTCTCCACCCCATTGACGTCAATGGGAGTTTGTTTTGGCACCAAAATCAACGGGACTTTCCAAAATGTCGT
AACAACTCCGCCCCATTGACGCAAATGGGCGGTAGGCGTGTACGGTGGGAGGTCTATATAAGCAGAGCTCTCT
GGCTAACTACCGGTGCCACCATGGCCCCAAAGAAGAAGCGGAAGGTCGGTATCCACGGAGTCCCAGCAGCCAA
GCGGAACTACATCCTGGGCCTGGCCATCGGCATCACCAGCGTGGGCTACGGCATCATCGACTACGAGACACGG
GACGTGATCGATGCCGGCGTGCGGCTGTTCAAAGAGGCCAACGTGGAAAACAACGAGGGCAGGCGGAGCAAG
AGAGGCGCCAGAAGGCTGAAGCGGCGGAGGCGGCATAGAATCCAGAGAGTGAAGAAGCTGCTGTTCGACTAC
AACCTGCTGACCGACCACAGCGAGCTGAGCGGCATCAACCCCTACGAGGCCAGAGTGAAGGGCCTGAGCCAG
AAGCTGAGCGAGGAAGAGTTCTCTGCCGCCCTGCTGCACCTGGCCAAGAGAAGAGGCGTGCACAACGTGAACG
AGGTGGAAGAGGACACCGGCAACGAGCTGTCCACCAAAGAGCAGATCAGCCGGAACAGCAAGGCCCTGGAAG
AGAAATACGTGGCCGAACTGCAGCTGGAACGGCTGAAGAAAGACGGCGAAGTGCGGGGCAGCATCAACAGATT
CAAGACCAGCGACTACGTGAAAGAAGCCAAACAGCTGCTGAAGGTGCAGAAGGCCTACCACCAGCTGGACCAG
AGCTTCATCGACACCTACATCGACCTGCTGGAAACCCGGCGGACCTACTATGAGGGACCTGGCGAGGGCAGCC
CCTTCGGCTGGAAGGACATCAAAGAATGGTACGAGATGCTGATGGGCCACTGCACCTACTTCCCCGAGGAACT
GCGGAGCGTGAAGTACGCCTACAACGCCGACCTGTACAACGCCCTGAACGACCTGAACAATCTCGTGATCACC
AGGGACGAGAACGAGAAGCTGGAATATTACGAGAAGTTCCAGATCATCGAGAACGTGTTCAAGCAGAAGAAGAA
GCCCACCCTGAAGCAGATCGCCAAAGAAATCCTCGTGAACGAAGAGGATATTAAGGGCTACAGAGTGACCAGCA
CCGGCAAGCCCGAGTTCACCAACCTGAAGGTGTACCACGACATCAAGGACATTACCGCCCGGAAAGAGATTATT
GAGAACGCCGAGCTGCTGGATCAGATTGCCAAGATCCTGACCATCTACCAGAGCAGCGAGGACATCCAGGAAG
AACTGACCAATCTGAACTCCGAGCTGACCCAGGAAGAGATCGAGCAGATCTCTAATCTGAAGGGCTATACCGGC
ACCCACAACCTGAGCCTGAAGGCCATCAACCTGATCCTGGACGAGCTGTGGCACACCAACGACAACCAGATCG
CTATCTTCAACCGGCTGAAGCTGGTGCCCAAGAAGGTGGACCTGTCCCAGCAGAAAGAGATCCCCACCACCCT
GGTGGACGACTTCATCCTGAGCCCCGTCGTGAAGAGAAGCTTCATCCAGAGCATCAAAGTGATCAACGCCATCA
TCAAGAAGTACGGCCTGCCCAACGACATCATTATCGAGCTGGCCCGCGAGAAGAACTCCAAGGACGCCCAGAA
AATGATCAACGAGATGCAGAAGCGGAACCGGCAGACCAACGAGCGGATCGAGGAAATCATCCGGACCACCGGC
AAAGAGAACGCCAAGTACCTGATCGAGAAGATCAAGCTGCACGACATGCAGGAAGGCAAGTGCCTGTACAGCC
TGGAAGCCATCCCTCTGGAAGATCTGCTGAACAACCCCTTCAACTATGAGGTGGACCACATCATCCCCAGAAGC
GTGTCCTTCGACAACAGCTTCAACAACAAGGTGCTCGTGAAGCAGGAAGAAGCCAGCAAGAAGGGCAACCGGA
CCCCATTCCAGTACCTGAGCAGCAGCGACAGCAAGATCAGCTACGAAACCTTCAAGAAGCACATCCTGAATCTG
GCCAAGGGCAAGGGCAGAATCAGCAAGACCAAGAAAGAGTATCTGCTGGAAGAACGGGACATCAACAGGTTCT
CCGTGCAGAAAGACTTCATCAACCGGAACCTGGTGGATACCAGATACGCCACCAGAGGCCTGATGAACCTGCT
GCGGAGCTACTTCAGAGTGAACAACCTGGACGTGAAAGTGAAGTCCATCAATGGCGGCTTCACCAGCTTTCTGC
GGCGGAAGTGGAAGTTTAAGAAAGAGCGGAACAAGGGGTACAAGCACCACGCCGAGGACGCCCTGATCATTGC
CAACGCCGATTTCATCTTCAAAGAGTGGAAGAAACTGGACAAGGCCAAAAAAGTGATGGAAAACCAGATGTTCG
AGGAAAAGCAGGCCGAGAGCATGCCCGAGATCGAAACCGAGCAGGAGTACAAAGAGATCTTCATCACCCCCCA
CCAGATCAAGCACATTAAGGACTTCAAGGACTACAAGTACAGCCACCGGGTGGACAAGAAGCCTAATAGAGAGC
TGATTAACGACACCCTGTACTCCACCCGGAAGGACGACAAGGGCAACACCCTGATCGTGAACAATCTGAACGGC
CTGTACGACAAGGACAATGACAAGCTGAAAAAGCTGATCAACAAGAGCCCCGAAAAGCTGCTGATGTACCACCA
CGACCCCCAGACCTACCAGAAACTGAAGCTGATTATGGAACAGTACGGCGACGAGAAGAATCCCCTGTACAAGT
ACTACGAGGAAACCGGGAACTACCTGACCAAGTACTCCAAAAAGGACAACGGCCCCGTGATCAAGAAGATTAAG
TATTACGGCAACAAACTGAACGCCCATCTGGACATCACCGACGACTACCCCAACAGCAGAAACAAGGTCGTGAA
GCTGTCCCTGAAGCCCTACAGATTCGACGTGTACCTGGACAATGGCGTGTACAAGTTCGTGACCGTGAAGAATC
TGGATGTGATCAAAAAAGAAAACTACTACGAAGTGAATAGCAAGTGCTATGAGGAAGCTAAGAAGCTGAAGAAGA
TCAGCAACCAGGCCGAGTTTATCGCCTCCTTCTACAACAACGATCTGATCAAGATCAACGGCGAGCTGTATAGA
GTGATCGGCGTGAACAACGACCTGCTGAACCGGATCGAAGTGAACATGATCGACATCACCTACCGCGAGTACCT
GGAAAACATGAACGACAAGAGGCCCCCCAGGATCATTAAGACAATCGCCTCCAAGACCCAGAGCATTAAGAAGT
ACAGCACAGACATTCTGGGCAACCTGTATGAAGTGAAATCTAAGAAGCACCCTCAGATCATCAAAAAGGGCAAAA
GGCCGGCGGCCACGAAAAAGGCCGGCCAGGCAAAAAAGAAAAAGGGATCCGGACGGGCTGACGCATTGGACG
ATTTTGATCTGGATATGCTGGGAAGTGACGCCCTCGATGATTTTGACCTTGACATGCTTGGTTCGGATGCCCTTG
ATGACTTTGACCTCGACATGCTCGGCAGTGACGCCCTTGATGATTTCGACCTGGACATGCTGATTAACTGTACAG
GCAGTGGAGAGGGCAGAGGAAGTCTGCTAACATGCGGTGACGTCGAGGAGAATCCTGGCCCAATGGCCAAGC
CTTTGTCTCAAGAAGAATCCACCCTCATTGAAAGAGCAACGGCTACAATCAACAGCATCCCCATCTCTGAAGACT
ACAGCGTCGCCAGCGCAGCTCTCTCTAGCGACGGCCGCATCTTCACTGGTGTCAATGTATATCATTTTACTGGG
GGACCTTGTGCAGAACTCGTGGTGCTGGGCACTGCTGCTGCTGCGGCAGCTGGCAACCTGACTTGTATCGTCG
CGATCGGAAATGAGAACAGGGGCATCTTGAGCCCCTGCGGACGGTGCCGACAGGTGCTTCTCGATCTGCATCC
TGGGATCAAAGCCATAGTGAAGGACAGTGATGGACAGCCGACGGCAGTTGGGATTCGTGAATTGCTGCCCTCT
GGTTATGTGTGGGAGGGCTAAGAATTCCTAGAGCTCGCTGATCAGCCTCGACTGTGCCTTCTAGTTGCCAGCCA
TCTGTTGTTTGCCCCTCCCCCGTGCCTTCCTTGACCCTGGAAGGTGCCACTCCCACTGTCCTTTCCTAATAAAAT
GAGGAAATTGCATCGCATTGTCTGAGTAGGTGTCATTCTATTCTGGGGGGTGGGGTGGGGCAGGACAGCAAGG
GGGAGGATTGGGAAGAGAATAGCAGGCATGCTGGGGAGGTACCGAGGGCCTATTTCCCATGATTCCTTCATATT
TGCATATACGATACAAGGCTGTTAGAGAGATAATTGGAATTAATTTGACTGTAAACACAAAGATATTAGTACAAAA
TACGTGACGTAGAAAGTAATAATTTCTTGGGTAGTTTGCAGTTTTAAAATTATGTTTTAAAATGGACTATCATATGC
TTACCGTAACTTGAAAGTATTTCGATTTCTTGGCTTTATATATCTTGTGGAAAGGACGAAAcaccgGCAGGGCTGGA
CTCCCCCTCgTTTTAGTACTCTGGAAACAGAATCTACTAAAACAAGGCAAAATGCCGTGTTTATCTCGTCAACTTG
TTGGCGAGATTTTTGCGGCCGCAGGAACCCCTAGTGATGGAGTTGGCCACTCCCTCTCTGCGCGCTCGCTCGC
TCACTGAGGCCGGGCGACCAAAGGTCGCCCGACGCCCGGGCTTTGCCCGGGCGGCCTCAGTGAGCGAGCGA
GCGCGCAGCTGCCTGCAGGGGCGCCTGATGCGGTATTTTCTCCTTACGCATCTGTGCGGTATTTCACACCGCAT
ACGTCAAAGCAACCATAGTACGCGCCCTGTAGCGGCGCATTAAGCGCGGCGGGTGTGGTGGTTACGCGCAGC
GTGACCGCTACACTTGCCAGCGCCTTAGCGCCCGCTCCTTTCGCTTTCTTCCCTTCCTTTCTCGCCACGTTCGC
CGGCTTTCCCCGTCAAGCTCTAAATCGGGGGCTCCCTTTAGGGTTCCGATTTAGTGCTTTACGGCACCTCGACC
CCAAAAAACTTGATTTGGGTGATGGTTCACGTAGTGGGCCATCGCCCTGATAGACGGTTTTTCGCCCTTTGACGT
TGGAGTCCACGTTCTTTAATAGTGGACTCTTGTTCCAAACTGGAACAACACTCAACTCTATCTCGGGCTATTCTTT
TGATTTATAAGGGATTTTGCCGATTTCGGTCTATTGGTTAAAAAATGAGCTGATTTAACAAAAATTTAACGCGAATT
TTAACAAAATATTAACGTTTACAATTTTATGGTGCACTCTCAGTACAATCTGCTCTGATGCCGCATAGTTAAGCCA
GCCCCGACACCCGCCAACACCCGCTGACGCGCCCTGACGGGCTTGTCTGCTCCCGGCATCCGCTTACAGACAA
GCTGTGACCGTCTCCGGGAGCTGCATGTGTCAGAGGTTTTCACCGTCATCACCGAAACGCGCGAGACGAAAGG
GCCTCGTGATACGCCTATTTTTATAGGTTAATGTCATGATAATAATGGTTTCTTAGACGTCAGGTGGCACTTTTCG
GGGAAATGTGCGCGGAACCCCTATTTGTTTATTTTTCTAAATACATTCAAATATGTATCCGCTCATGAGACAATAA
CCCTGATAAATGCTTCAATAATATTGAAAAAGGAAGAGTATGAGTATTCAACATTTCCGTGTCGCCCTTATTCCCT
TTTTTGCGGCATTTTGCCTTCCTGTTTTTGCTCACCCAGAAACGCTGGTGAAAGTAAAAGATGCTGAAGATCAGTT
GGGTGCACGAGTGGGTTACATCGAACTGGATCTCAACAGCGGTAAGATCCTTGAGAGTTTTCGCCCCGAAGAAC
GTTTTCCAATGATGAGCACTTTTAAAGTTCTGCTATGTGGCGCGGTATTATCCCGTATTGACGCCGGGCAAGAGC
AACTCGGTCGCCGCATACACTATTCTCAGAATGACTTGGTTGAGTACTCACCAGTCACAGAAAAGCATCTTACGG
ATGGCATGACAGTAAGAGAATTATGCAGTGCTGCCATAACCATGAGTGATAACACTGCGGCCAACTTACTTCTGA
CAACGATCGGAGGACCGAAGGAGCTAACCGCTTTTTTGCACAACATGGGGGATCATGTAACTCGCCTTGATCGT
TGGGAACCGGAGCTGAATGAAGCCATACCAAACGACGAGCGTGACACCACGATGCCTGTAGCAATGGCAACAA
CGTTGCGCAAACTATTAACTGGCGAACTACTTACTCTAGCTTCCCGGCAACAATTAATAGACTGGATGGAGGCG
GATAAAGTTGCAGGACCACTTCTGCGCTCGGCCCTTCCGGCTGGCTGGTTTATTGCTGATAAATCTGGAGCCGG
TGAGCGTGGAAGCCGCGGTATCATTGCAGCACTGGGGCCAGATGGTAAGCCCTCCCGTATCGTAGTTATCTACA
CGACGGGGAGTCAGGCAACTATGGATGAACGAAATAGACAGATCGCTGAGATAGGTGCCTCACTGATTAAGCAT
TGGTAACTGTCAGACCAAGTTTACTCATATATACTTTAGATTGATTTAAAACTTCATTTTTAATTTAAAAGGATCTAG
GTGAAGATCCTTTTTGATAATCTCATGACCAAAATCCCTTAACGTGAGTTTTCGTTCCACTGAGCGTCAGACCCC
GTAGAAAAGATCAAAGGATCTTCTTGAGATCCTTTTTTTCTGCGCGTAATCTGCTGCTTGCAAACAAAAAAACCAC
CGCTACCAGCGGTGGTTTGTTTGCCGGATCAAGAGCTACCAACTCTTTTTCCGAAGGTAACTGGCTTCAGCAGA
GCGCAGATACCAAATACTGTTCTTCTAGTGTAGCCGTAGTTAGGCCACCACTTCAAGAACTCTGTAGCACCGCCT
ACATACCTCGCTCTGCTAATCCTGTTACCAGTGGCTGCTGCCAGTGGCGATAAGTCGTGTCTTACCGGGTTGGA
CTCAAGACGATAGTTACCGGATAAGGCGCAGCGGTCGGGCTGAACGGGGGGTTCGTGCACACAGCCCAGCTTG
GAGCGAACGACCTACACCGAACTGAGATACCTACAGCGTGAGCTATGAGAAAGCGCCACGCTTCCCGAAGGGA
GAAAGGCGGACAGGTATCCGGTAAGCGGCAGGGTCGGAACAGGAGAGCGCACGAGGGAGCTTCCAGGGGGA
AACGCCTGGTATCTTTATAGTCCTGTCGGGTTTCGCCACCTCTGACTTGAGCGTCGATTTTTGTGATGCTCGTCA
GGGGGGCGGAGCCTATGGAAAAACGCCAGCAACGCGGCCTTTTTACGGTTCCTGGCCTTTTGCTGGCCTTTTG
CTCACATGT
pAAV-CMV-sadCas9-U6gRNA(Kcnq2-sa_sgRNA4) used in in vitro qPCR experiments (SEQ ID NO: 84)
CCTGCAGGCAGCTGCGCGCTCGCTCGCTCACTGAGGCCGCCCGGGCGTCGGGCGACCTTTGGTCGCCCGGCC
TCAGTGAGCGAGCGAGCGCGCAGAGAGGGAGTGGCCAACTCCATCACTAGGGGTTCCTGCGGCCTCTAGACTC
GAGGCGTTGACATTGATTATTGACTAGTTATTAATAGTAATCAATTACGGGGTCATTAGTTCATAGCCCATATATG
GAGTTCCGCGTTACATAACTTACGGTAAATGGCCCGCCTGGCTGACCGCCCAACGACCCCCGCCCATTGACGT
CAATAATGACGTATGTTCCCATAGTAACGCCAATAGGGACTTTCCATTGACGTCAATGGGTGGAGTATTTACGGT
AAACTGCCCACTTGGCAGTACATCAAGTGTATCATATGCCAAGTACGCCCCCTATTGACGTCAATGACGGTAAAT
GGCCCGCCTGGCATTATGCCCAGTACATGACCTTATGGGACTTTCCTACTTGGCAGTACATCTACGTATTAGTCA
TCGCTATTACCATGGTGATGCGGTTTTGGCAGTACATCAATGGGCGTGGATAGCGGTTTGACTCACGGGGATTT
CCAAGTCTCCACCCCATTGACGTCAATGGGAGTTTGTTTTGGCACCAAAATCAACGGGACTTTCCAAAATGTCGT
AACAACTCCGCCCCATTGACGCAAATGGGCGGTAGGCGTGTACGGTGGGAGGTCTATATAAGCAGAGCTCTCT
GGCTAACTACCGGTGCCACCATGGCCCCAAAGAAGAAGCGGAAGGTCGGTATCCACGGAGTCCCAGCAGCCAA
GCGGAACTACATCCTGGGCCTGGCCATCGGCATCACCAGCGTGGGCTACGGCATCATCGACTACGAGACACGG
GACGTGATCGATGCCGGCGTGCGGCTGTTCAAAGAGGCCAACGTGGAAAACAACGAGGGCAGGCGGAGCAAG
AGAGGCGCCAGAAGGCTGAAGCGGCGGAGGCGGCATAGAATCCAGAGAGTGAAGAAGCTGCTGTTCGACTAC
AACCTGCTGACCGACCACAGCGAGCTGAGCGGCATCAACCCCTACGAGGCCAGAGTGAAGGGCCTGAGCCAG
AAGCTGAGCGAGGAAGAGTTCTCTGCCGCCCTGCTGCACCTGGCCAAGAGAAGAGGCGTGCACAACGTGAACG
AGGTGGAAGAGGACACCGGCAACGAGCTGTCCACCAAAGAGCAGATCAGCCGGAACAGCAAGGCCCTGGAAG
AGAAATACGTGGCCGAACTGCAGCTGGAACGGCTGAAGAAAGACGGCGAAGTGCGGGGCAGCATCAACAGATT
CAAGACCAGCGACTACGTGAAAGAAGCCAAACAGCTGCTGAAGGTGCAGAAGGCCTACCACCAGCTGGACCAG
AGCTTCATCGACACCTACATCGACCTGCTGGAAACCCGGCGGACCTACTATGAGGGACCTGGCGAGGGCAGCC
CCTTCGGCTGGAAGGACATCAAAGAATGGTACGAGATGCTGATGGGCCACTGCACCTACTTCCCCGAGGAACT
GCGGAGCGTGAAGTACGCCTACAACGCCGACCTGTACAACGCCCTGAACGACCTGAACAATCTCGTGATCACC
AGGGACGAGAACGAGAAGCTGGAATATTACGAGAAGTTCCAGATCATCGAGAACGTGTTCAAGCAGAAGAAGAA
GCCCACCCTGAAGCAGATCGCCAAAGAAATCCTCGTGAACGAAGAGGATATTAAGGGCTACAGAGTGACCAGCA
CCGGCAAGCCCGAGTTCACCAACCTGAAGGTGTACCACGACATCAAGGACATTACCGCCCGGAAAGAGATTATT
GAGAACGCCGAGCTGCTGGATCAGATTGCCAAGATCCTGACCATCTACCAGAGCAGCGAGGACATCCAGGAAG
AACTGACCAATCTGAACTCCGAGCTGACCCAGGAAGAGATCGAGCAGATCTCTAATCTGAAGGGCTATACCGGC
ACCCACAACCTGAGCCTGAAGGCCATCAACCTGATCCTGGACGAGCTGTGGCACACCAACGACAACCAGATCG
CTATCTTCAACCGGCTGAAGCTGGTGCCCAAGAAGGTGGACCTGTCCCAGCAGAAAGAGATCCCCACCACCCT
GGTGGACGACTTCATCCTGAGCCCCGTCGTGAAGAGAAGCTTCATCCAGAGCATCAAAGTGATCAACGCCATCA
TCAAGAAGTACGGCCTGCCCAACGACATCATTATCGAGCTGGCCCGCGAGAAGAACTCCAAGGACGCCCAGAA
AATGATCAACGAGATGCAGAAGCGGAACCGGCAGACCAACGAGCGGATCGAGGAAATCATCCGGACCACCGGC
AAAGAGAACGCCAAGTACCTGATCGAGAAGATCAAGCTGCACGACATGCAGGAAGGCAAGTGCCTGTACAGCC
TGGAAGCCATCCCTCTGGAAGATCTGCTGAACAACCCCTTCAACTATGAGGTGGACCACATCATCCCCAGAAGC
GTGTCCTTCGACAACAGCTTCAACAACAAGGTGCTCGTGAAGCAGGAAGAAGCCAGCAAGAAGGGCAACCGGA
CCCCATTCCAGTACCTGAGCAGCAGCGACAGCAAGATCAGCTACGAAACCTTCAAGAAGCACATCCTGAATCTG
GCCAAGGGCAAGGGCAGAATCAGCAAGACCAAGAAAGAGTATCTGCTGGAAGAACGGGACATCAACAGGTTCT
CCGTGCAGAAAGACTTCATCAACCGGAACCTGGTGGATACCAGATACGCCACCAGAGGCCTGATGAACCTGCT
GCGGAGCTACTTCAGAGTGAACAACCTGGACGTGAAAGTGAAGTCCATCAATGGCGGCTTCACCAGCTTTCTGC
GGCGGAAGTGGAAGTTTAAGAAAGAGCGGAACAAGGGGTACAAGCACCACGCCGAGGACGCCCTGATCATTGC
CAACGCCGATTTCATCTTCAAAGAGTGGAAGAAACTGGACAAGGCCAAAAAAGTGATGGAAAACCAGATGTTCG
AGGAAAAGCAGGCCGAGAGCATGCCCGAGATCGAAACCGAGCAGGAGTACAAAGAGATCTTCATCACCCCCCA
CCAGATCAAGCACATTAAGGACTTCAAGGACTACAAGTACAGCCACCGGGTGGACAAGAAGCCTAATAGAGAGC
TGATTAACGACACCCTGTACTCCACCCGGAAGGACGACAAGGGCAACACCCTGATCGTGAACAATCTGAACGGC
CTGTACGACAAGGACAATGACAAGCTGAAAAAGCTGATCAACAAGAGCCCCGAAAAGCTGCTGATGTACCACCA
CGACCCCCAGACCTACCAGAAACTGAAGCTGATTATGGAACAGTACGGCGACGAGAAGAATCCCCTGTACAAGT
ACTACGAGGAAACCGGGAACTACCTGACCAAGTACTCCAAAAAGGACAACGGCCCCGTGATCAAGAAGATTAAG
TATTACGGCAACAAACTGAACGCCCATCTGGACATCACCGACGACTACCCCAACAGCAGAAACAAGGTCGTGAA
GCTGTCCCTGAAGCCCTACAGATTCGACGTGTACCTGGACAATGGCGTGTACAAGTTCGTGACCGTGAAGAATC
TGGATGTGATCAAAAAAGAAAACTACTACGAAGTGAATAGCAAGTGCTATGAGGAAGCTAAGAAGCTGAAGAAGA
TCAGCAACCAGGCCGAGTTTATCGCCTCCTTCTACAACAACGATCTGATCAAGATCAACGGCGAGCTGTATAGA
GTGATCGGCGTGAACAACGACCTGCTGAACCGGATCGAAGTGAACATGATCGACATCACCTACCGCGAGTACCT
GGAAAACATGAACGACAAGAGGCCCCCCAGGATCATTAAGACAATCGCCTCCAAGACCCAGAGCATTAAGAAGT
ACAGCACAGACATTCTGGGCAACCTGTATGAAGTGAAATCTAAGAAGCACCCTCAGATCATCAAAAAGGGCAAAA
GGCCGGCGGCCACGAAAAAGGCCGGCCAGGCAAAAAAGAAAAAGGGATCCGGACGGGCTGACGCATTGGACG
ATTTTGATCTGGATATGCTGGGAAGTGACGCCCTCGATGATTTTGACCTTGACATGCTTGGTTCGGATGCCCTTG
ATGACTTTGACCTCGACATGCTCGGCAGTGACGCCCTTGATGATTTCGACCTGGACATGCTGATTAACTGTACAG
GCAGTGGAGAGGGCAGAGGAAGTCTGCTAACATGCGGTGACGTCGAGGAGAATCCTGGCCCAATGGCCAAGC
CTTTGTCTCAAGAAGAATCCACCCTCATTGAAAGAGCAACGGCTACAATCAACAGCATCCCCATCTCTGAAGACT
ACAGCGTCGCCAGCGCAGCTCTCTCTAGCGACGGCCGCATCTTCACTGGTGTCAATGTATATCATTTTACTGGG
GGACCTTGTGCAGAACTCGTGGTGCTGGGCACTGCTGCTGCTGCGGCAGCTGGCAACCTGACTTGTATCGTCG
CGATCGGAAATGAGAACAGGGGCATCTTGAGCCCCTGCGGACGGTGCCGACAGGTGCTTCTCGATCTGCATCC
TGGGATCAAAGCCATAGTGAAGGACAGTGATGGACAGCCGACGGCAGTTGGGATTCGTGAATTGCTGCCCTCT
GGTTATGTGTGGGAGGGCTAAGAATTCCTAGAGCTCGCTGATCAGCCTCGACTGTGCCTTCTAGTTGCCAGCCA
TCTGTTGTTTGCCCCTCCCCCGTGCCTTCCTTGACCCTGGAAGGTGCCACTCCCACTGTCCTTTCCTAATAAAAT
GAGGAAATTGCATCGCATTGTCTGAGTAGGTGTCATTCTATTCTGGGGGGTGGGGTGGGGCAGGACAGCAAGG
GGGAGGATTGGGAAGAGAATAGCAGGCATGCTGGGGAGGTACCGAGGGCCTATTTCCCATGATTCCTTCATATT
TGCATATACGATACAAGGCTGTTAGAGAGATAATTGGAATTAATTTGACTGTAAACACAAAGATATTAGTACAAAA
TACGTGACGTAGAAAGTAATAATTTCTTGGGTAGTTTGCAGTTTTAAAATTATGTTTTAAAATGGACTATCATATGC
TTACCGTAACTTGAAAGTATTTCGATTTCTTGGCTTTATATATCTTGTGGAAAGGACGAAAcaccCTAGCCCGGTAA
TCCTTGAGGgTTTTAGTACTCTGGAAACAGAATCTACTAAAACAAGGCAAAATGCCGTGTTTATCTCGTCAACTTG
TTGGCGAGATTTTTGCGGCCGCAGGAACCCCTAGTGATGGAGTTGGCCACTCCCTCTCTGCGCGCTCGCTCGC
TCACTGAGGCCGGGCGACCAAAGGTCGCCCGACGCCCGGGCTTTGCCCGGGCGGCCTCAGTGAGCGAGCGA
GCGCGCAGCTGCCTGCAGGGGCGCCTGATGCGGTATTTTCTCCTTACGCATCTGTGCGGTATTTCACACCGCAT
ACGTCAAAGCAACCATAGTACGCGCCCTGTAGCGGCGCATTAAGCGCGGCGGGTGTGGTGGTTACGCGCAGC
GTGACCGCTACACTTGCCAGCGCCTTAGCGCCCGCTCCTTTCGCTTTCTTCCCTTCCTTTCTCGCCACGTTCGC
CGGCTTTCCCCGTCAAGCTCTAAATCGGGGGCTCCCTTTAGGGTTCCGATTTAGTGCTTTACGGCACCTCGACC
CCAAAAAACTTGATTTGGGTGATGGTTCACGTAGTGGGCCATCGCCCTGATAGACGGTTTTTCGCCCTTTGACGT
TGGAGTCCACGTTCTTTAATAGTGGACTCTTGTTCCAAACTGGAACAACACTCAACTCTATCTCGGGCTATTCTTT
TGATTTATAAGGGATTTTGCCGATTTCGGTCTATTGGTTAAAAAATGAGCTGATTTAACAAAAATTTAACGCGAATT
TTAACAAAATATTAACGTTTACAATTTTATGGTGCACTCTCAGTACAATCTGCTCTGATGCCGCATAGTTAAGCCA
GCCCCGACACCCGCCAACACCCGCTGACGCGCCCTGACGGGCTTGTCTGCTCCCGGCATCCGCTTACAGACAA
GCTGTGACCGTCTCCGGGAGCTGCATGTGTCAGAGGTTTTCACCGTCATCACCGAAACGCGCGAGACGAAAGG
GCCTCGTGATACGCCTATTTTTATAGGTTAATGTCATGATAATAATGGTTTCTTAGACGTCAGGTGGCACTTTTCG
GGGAAATGTGCGCGGAACCCCTATTTGTTTATTTTTCTAAATACATTCAAATATGTATCCGCTCATGAGACAATAA
CCCTGATAAATGCTTCAATAATATTGAAAAAGGAAGAGTATGAGTATTCAACATTTCCGTGTCGCCCTTATTCCCT
TTTTTGCGGCATTTTGCCTTCCTGTTTTTGCTCACCCAGAAACGCTGGTGAAAGTAAAAGATGCTGAAGATCAGTT
GGGTGCACGAGTGGGTTACATCGAACTGGATCTCAACAGCGGTAAGATCCTTGAGAGTTTTCGCCCCGAAGAAC
GTTTTCCAATGATGAGCACTTTTAAAGTTCTGCTATGTGGCGCGGTATTATCCCGTATTGACGCCGGGCAAGAGC
AACTCGGTCGCCGCATACACTATTCTCAGAATGACTTGGTTGAGTACTCACCAGTCACAGAAAAGCATCTTACGG
ATGGCATGACAGTAAGAGAATTATGCAGTGCTGCCATAACCATGAGTGATAACACTGCGGCCAACTTACTTCTGA
CAACGATCGGAGGACCGAAGGAGCTAACCGCTTTTTTGCACAACATGGGGGATCATGTAACTCGCCTTGATCGT
TGGGAACCGGAGCTGAATGAAGCCATACCAAACGACGAGCGTGACACCACGATGCCTGTAGCAATGGCAACAA
CGTTGCGCAAACTATTAACTGGCGAACTACTTACTCTAGCTTCCCGGCAACAATTAATAGACTGGATGGAGGCG
GATAAAGTTGCAGGACCACTTCTGCGCTCGGCCCTTCCGGCTGGCTGGTTTATTGCTGATAAATCTGGAGCCGG
TGAGCGTGGAAGCCGCGGTATCATTGCAGCACTGGGGCCAGATGGTAAGCCCTCCCGTATCGTAGTTATCTACA
CGACGGGGAGTCAGGCAACTATGGATGAACGAAATAGACAGATCGCTGAGATAGGTGCCTCACTGATTAAGCAT
TGGTAACTGTCAGACCAAGTTTACTCATATATACTTTAGATTGATTTAAAACTTCATTTTTAATTTAAAAGGATCTAG
GTGAAGATCCTTTTTGATAATCTCATGACCAAAATCCCTTAACGTGAGTTTTCGTTCCACTGAGCGTCAGACCCC
GTAGAAAAGATCAAAGGATCTTCTTGAGATCCTTTTTTTCTGCGCGTAATCTGCTGCTTGCAAACAAAAAAACCAC
CGCTACCAGCGGTGGTTTGTTTGCCGGATCAAGAGCTACCAACTCTTTTTCCGAAGGTAACTGGCTTCAGCAGA
GCGCAGATACCAAATACTGTTCTTCTAGTGTAGCCGTAGTTAGGCCACCACTTCAAGAACTCTGTAGCACCGCCT
ACATACCTCGCTCTGCTAATCCTGTTACCAGTGGCTGCTGCCAGTGGCGATAAGTCGTGTCTTACCGGGTTGGA
CTCAAGACGATAGTTACCGGATAAGGCGCAGCGGTCGGGCTGAACGGGGGGTTCGTGCACACAGCCCAGCTTG
GAGCGAACGACCTACACCGAACTGAGATACCTACAGCGTGAGCTATGAGAAAGCGCCACGCTTCCCGAAGGGA
GAAAGGCGGACAGGTATCCGGTAAGCGGCAGGGTCGGAACAGGAGAGCGCACGAGGGAGCTTCCAGGGGGA
AACGCCTGGTATCTTTATAGTCCTGTCGGGTTTCGCCACCTCTGACTTGAGCGTCGATTTTTGTGATGCTCGTCA
GGGGGGCGGAGCCTATGGAAAAACGCCAGCAACGCGGCCTTTTTACGGTTCCTGGCCTTTTGCTGGCCTTTTG
CTCACATGT
pAAV-CMV-sadCas9-U6gRNA(Kcnq2-sa_sgRNA5) used in in vitro qPCR experiments (SEQ ID NO: 85)
CCTGCAGGCAGCTGCGCGCTCGCTCGCTCACTGAGGCCGCCCGGGCGTCGGGCGACCTTTGGTCGCCCGGCC
TCAGTGAGCGAGCGAGCGCGCAGAGAGGGAGTGGCCAACTCCATCACTAGGGGTTCCTGCGGCCTCTAGACTC
GAGGCGTTGACATTGATTATTGACTAGTTATTAATAGTAATCAATTACGGGGTCATTAGTTCATAGCCCATATATG
GAGTTCCGCGTTACATAACTTACGGTAAATGGCCCGCCTGGCTGACCGCCCAACGACCCCCGCCCATTGACGT
CAATAATGACGTATGTTCCCATAGTAACGCCAATAGGGACTTTCCATTGACGTCAATGGGTGGAGTATTTACGGT
AAACTGCCCACTTGGCAGTACATCAAGTGTATCATATGCCAAGTACGCCCCCTATTGACGTCAATGACGGTAAAT
GGCCCGCCTGGCATTATGCCCAGTACATGACCTTATGGGACTTTCCTACTTGGCAGTACATCTACGTATTAGTCA
TCGCTATTACCATGGTGATGCGGTTTTGGCAGTACATCAATGGGCGTGGATAGCGGTTTGACTCACGGGGATTT
CCAAGTCTCCACCCCATTGACGTCAATGGGAGTTTGTTTTGGCACCAAAATCAACGGGACTTTCCAAAATGTCGT
AACAACTCCGCCCCATTGACGCAAATGGGCGGTAGGCGTGTACGGTGGGAGGTCTATATAAGCAGAGCTCTCT
GGCTAACTACCGGTGCCACCATGGCCCCAAAGAAGAAGCGGAAGGTCGGTATCCACGGAGTCCCAGCAGCCAA
GCGGAACTACATCCTGGGCCTGGCCATCGGCATCACCAGCGTGGGCTACGGCATCATCGACTACGAGACACGG
GACGTGATCGATGCCGGCGTGCGGCTGTTCAAAGAGGCCAACGTGGAAAACAACGAGGGCAGGCGGAGCAAG
AGAGGCGCCAGAAGGCTGAAGCGGCGGAGGCGGCATAGAATCCAGAGAGTGAAGAAGCTGCTGTTCGACTAC
AACCTGCTGACCGACCACAGCGAGCTGAGCGGCATCAACCCCTACGAGGCCAGAGTGAAGGGCCTGAGCCAG
AAGCTGAGCGAGGAAGAGTTCTCTGCCGCCCTGCTGCACCTGGCCAAGAGAAGAGGCGTGCACAACGTGAACG
AGGTGGAAGAGGACACCGGCAACGAGCTGTCCACCAAAGAGCAGATCAGCCGGAACAGCAAGGCCCTGGAAG
AGAAATACGTGGCCGAACTGCAGCTGGAACGGCTGAAGAAAGACGGCGAAGTGCGGGGCAGCATCAACAGATT
CAAGACCAGCGACTACGTGAAAGAAGCCAAACAGCTGCTGAAGGTGCAGAAGGCCTACCACCAGCTGGACCAG
AGCTTCATCGACACCTACATCGACCTGCTGGAAACCCGGCGGACCTACTATGAGGGACCTGGCGAGGGCAGCC
CCTTCGGCTGGAAGGACATCAAAGAATGGTACGAGATGCTGATGGGCCACTGCACCTACTTCCCCGAGGAACT
GCGGAGCGTGAAGTACGCCTACAACGCCGACCTGTACAACGCCCTGAACGACCTGAACAATCTCGTGATCACC
AGGGACGAGAACGAGAAGCTGGAATATTACGAGAAGTTCCAGATCATCGAGAACGTGTTCAAGCAGAAGAAGAA
GCCCACCCTGAAGCAGATCGCCAAAGAAATCCTCGTGAACGAAGAGGATATTAAGGGCTACAGAGTGACCAGCA
CCGGCAAGCCCGAGTTCACCAACCTGAAGGTGTACCACGACATCAAGGACATTACCGCCCGGAAAGAGATTATT
GAGAACGCCGAGCTGCTGGATCAGATTGCCAAGATCCTGACCATCTACCAGAGCAGCGAGGACATCCAGGAAG
AACTGACCAATCTGAACTCCGAGCTGACCCAGGAAGAGATCGAGCAGATCTCTAATCTGAAGGGCTATACCGGC
ACCCACAACCTGAGCCTGAAGGCCATCAACCTGATCCTGGACGAGCTGTGGCACACCAACGACAACCAGATCG
CTATCTTCAACCGGCTGAAGCTGGTGCCCAAGAAGGTGGACCTGTCCCAGCAGAAAGAGATCCCCACCACCCT
GGTGGACGACTTCATCCTGAGCCCCGTCGTGAAGAGAAGCTTCATCCAGAGCATCAAAGTGATCAACGCCATCA
TCAAGAAGTACGGCCTGCCCAACGACATCATTATCGAGCTGGCCCGCGAGAAGAACTCCAAGGACGCCCAGAA
AATGATCAACGAGATGCAGAAGCGGAACCGGCAGACCAACGAGCGGATCGAGGAAATCATCCGGACCACCGGC
AAAGAGAACGCCAAGTACCTGATCGAGAAGATCAAGCTGCACGACATGCAGGAAGGCAAGTGCCTGTACAGCC
TGGAAGCCATCCCTCTGGAAGATCTGCTGAACAACCCCTTCAACTATGAGGTGGACCACATCATCCCCAGAAGC
GTGTCCTTCGACAACAGCTTCAACAACAAGGTGCTCGTGAAGCAGGAAGAAGCCAGCAAGAAGGGCAACCGGA
CCCCATTCCAGTACCTGAGCAGCAGCGACAGCAAGATCAGCTACGAAACCTTCAAGAAGCACATCCTGAATCTG
GCCAAGGGCAAGGGCAGAATCAGCAAGACCAAGAAAGAGTATCTGCTGGAAGAACGGGACATCAACAGGTTCT
CCGTGCAGAAAGACTTCATCAACCGGAACCTGGTGGATACCAGATACGCCACCAGAGGCCTGATGAACCTGCT
GCGGAGCTACTTCAGAGTGAACAACCTGGACGTGAAAGTGAAGTCCATCAATGGCGGCTTCACCAGCTTTCTGC
GGCGGAAGTGGAAGTTTAAGAAAGAGCGGAACAAGGGGTACAAGCACCACGCCGAGGACGCCCTGATCATTGC
CAACGCCGATTTCATCTTCAAAGAGTGGAAGAAACTGGACAAGGCCAAAAAAGTGATGGAAAACCAGATGTTCG
AGGAAAAGCAGGCCGAGAGCATGCCCGAGATCGAAACCGAGCAGGAGTACAAAGAGATCTTCATCACCCCCCA
CCAGATCAAGCACATTAAGGACTTCAAGGACTACAAGTACAGCCACCGGGTGGACAAGAAGCCTAATAGAGAGC
TGATTAACGACACCCTGTACTCCACCCGGAAGGACGACAAGGGCAACACCCTGATCGTGAACAATCTGAACGGC
CTGTACGACAAGGACAATGACAAGCTGAAAAAGCTGATCAACAAGAGCCCCGAAAAGCTGCTGATGTACCACCA
CGACCCCCAGACCTACCAGAAACTGAAGCTGATTATGGAACAGTACGGCGACGAGAAGAATCCCCTGTACAAGT
ACTACGAGGAAACCGGGAACTACCTGACCAAGTACTCCAAAAAGGACAACGGCCCCGTGATCAAGAAGATTAAG
TATTACGGCAACAAACTGAACGCCCATCTGGACATCACCGACGACTACCCCAACAGCAGAAACAAGGTCGTGAA
GCTGTCCCTGAAGCCCTACAGATTCGACGTGTACCTGGACAATGGCGTGTACAAGTTCGTGACCGTGAAGAATC
TGGATGTGATCAAAAAAGAAAACTACTACGAAGTGAATAGCAAGTGCTATGAGGAAGCTAAGAAGCTGAAGAAGA
TCAGCAACCAGGCCGAGTTTATCGCCTCCTTCTACAACAACGATCTGATCAAGATCAACGGCGAGCTGTATAGA
GTGATCGGCGTGAACAACGACCTGCTGAACCGGATCGAAGTGAACATGATCGACATCACCTACCGCGAGTACCT
GGAAAACATGAACGACAAGAGGCCCCCCAGGATCATTAAGACAATCGCCTCCAAGACCCAGAGCATTAAGAAGT
ACAGCACAGACATTCTGGGCAACCTGTATGAAGTGAAATCTAAGAAGCACCCTCAGATCATCAAAAAGGGCAAAA
GGCCGGCGGCCACGAAAAAGGCCGGCCAGGCAAAAAAGAAAAAGGGATCCGGACGGGCTGACGCATTGGACG
ATTTTGATCTGGATATGCTGGGAAGTGACGCCCTCGATGATTTTGACCTTGACATGCTTGGTTCGGATGCCCTTG
ATGACTTTGACCTCGACATGCTCGGCAGTGACGCCCTTGATGATTTCGACCTGGACATGCTGATTAACTGTACAG
GCAGTGGAGAGGGCAGAGGAAGTCTGCTAACATGCGGTGACGTCGAGGAGAATCCTGGCCCAATGGCCAAGC
CTTTGTCTCAAGAAGAATCCACCCTCATTGAAAGAGCAACGGCTACAATCAACAGCATCCCCATCTCTGAAGACT
ACAGCGTCGCCAGCGCAGCTCTCTCTAGCGACGGCCGCATCTTCACTGGTGTCAATGTATATCATTTTACTGGG
GGACCTTGTGCAGAACTCGTGGTGCTGGGCACTGCTGCTGCTGCGGCAGCTGGCAACCTGACTTGTATCGTCG
CGATCGGAAATGAGAACAGGGGCATCTTGAGCCCCTGCGGACGGTGCCGACAGGTGCTTCTCGATCTGCATCC
TGGGATCAAAGCCATAGTGAAGGACAGTGATGGACAGCCGACGGCAGTTGGGATTCGTGAATTGCTGCCCTCT
GGTTATGTGTGGGAGGGCTAAGAATTCCTAGAGCTCGCTGATCAGCCTCGACTGTGCCTTCTAGTTGCCAGCCA
TCTGTTGTTTGCCCCTCCCCCGTGCCTTCCTTGACCCTGGAAGGTGCCACTCCCACTGTCCTTTCCTAATAAAAT
GAGGAAATTGCATCGCATTGTCTGAGTAGGTGTCATTCTATTCTGGGGGGTGGGGTGGGGCAGGACAGCAAGG
GGGAGGATTGGGAAGAGAATAGCAGGCATGCTGGGGAGGTACCGAGGGCCTATTTCCCATGATTCCTTCATATT
TGCATATACGATACAAGGCTGTTAGAGAGATAATTGGAATTAATTTGACTGTAAACACAAAGATATTAGTACAAAA
TACGTGACGTAGAAAGTAATAATTTCTTGGGTAGTTTGCAGTTTTAAAATTATGTTTTAAAATGGACTATCATATGC
TTACCGTAACTTGAAAGTATTTCGATTTCTTGGCTTTATATATCTTGTGGAAAGGACGAAAcaccGGCAGGGCTGG
ACTCCCCCTCgTTTTAGTACTCTGGAAACAGAATCTACTAAAACAAGGCAAAATGCCGTGTTTATCTCGTCAACTT
GTTGGCGAGATTTTTGCGGCCGCAGGAACCCCTAGTGATGGAGTTGGCCACTCCCTCTCTGCGCGCTCGCTCG
CTCACTGAGGCCGGGCGACCAAAGGTCGCCCGACGCCCGGGCTTTGCCCGGGCGGCCTCAGTGAGCGAGCG
AGCGCGCAGCTGCCTGCAGGGGCGCCTGATGCGGTATTTTCTCCTTACGCATCTGTGCGGTATTTCACACCGCA
TACGTCAAAGCAACCATAGTACGCGCCCTGTAGCGGCGCATTAAGCGCGGCGGGTGTGGTGGTTACGCGCAGC
GTGACCGCTACACTTGCCAGCGCCTTAGCGCCCGCTCCTTTCGCTTTCTTCCCTTCCTTTCTCGCCACGTTCGC
CGGCTTTCCCCGTCAAGCTCTAAATCGGGGGCTCCCTTTAGGGTTCCGATTTAGTGCTTTACGGCACCTCGACC
CCAAAAAACTTGATTTGGGTGATGGTTCACGTAGTGGGCCATCGCCCTGATAGACGGTTTTTCGCCCTTTGACGT
TGGAGTCCACGTTCTTTAATAGTGGACTCTTGTTCCAAACTGGAACAACACTCAACTCTATCTCGGGCTATTCTTT
TGATTTATAAGGGATTTTGCCGATTTCGGTCTATTGGTTAAAAAATGAGCTGATTTAACAAAAATTTAACGCGAATT
TTAACAAAATATTAACGTTTACAATTTTATGGTGCACTCTCAGTACAATCTGCTCTGATGCCGCATAGTTAAGCCA
GCCCCGACACCCGCCAACACCCGCTGACGCGCCCTGACGGGCTTGTCTGCTCCCGGCATCCGCTTACAGACAA
GCTGTGACCGTCTCCGGGAGCTGCATGTGTCAGAGGTTTTCACCGTCATCACCGAAACGCGCGAGACGAAAGG
GCCTCGTGATACGCCTATTTTTATAGGTTAATGTCATGATAATAATGGTTTCTTAGACGTCAGGTGGCACTTTTCG
GGGAAATGTGCGCGGAACCCCTATTTGTTTATTTTTCTAAATACATTCAAATATGTATCCGCTCATGAGACAATAA
CCCTGATAAATGCTTCAATAATATTGAAAAAGGAAGAGTATGAGTATTCAACATTTCCGTGTCGCCCTTATTCCCT
TTTTTGCGGCATTTTGCCTTCCTGTTTTTGCTCACCCAGAAACGCTGGTGAAAGTAAAAGATGCTGAAGATCAGTT
GGGTGCACGAGTGGGTTACATCGAACTGGATCTCAACAGCGGTAAGATCCTTGAGAGTTTTCGCCCCGAAGAAC
GTTTTCCAATGATGAGCACTTTTAAAGTTCTGCTATGTGGCGCGGTATTATCCCGTATTGACGCCGGGCAAGAGC
AACTCGGTCGCCGCATACACTATTCTCAGAATGACTTGGTTGAGTACTCACCAGTCACAGAAAAGCATCTTACGG
ATGGCATGACAGTAAGAGAATTATGCAGTGCTGCCATAACCATGAGTGATAACACTGCGGCCAACTTACTTCTGA
CAACGATCGGAGGACCGAAGGAGCTAACCGCTTTTTTGCACAACATGGGGGATCATGTAACTCGCCTTGATCGT
TGGGAACCGGAGCTGAATGAAGCCATACCAAACGACGAGCGTGACACCACGATGCCTGTAGCAATGGCAACAA
CGTTGCGCAAACTATTAACTGGCGAACTACTTACTCTAGCTTCCCGGCAACAATTAATAGACTGGATGGAGGCG
GATAAAGTTGCAGGACCACTTCTGCGCTCGGCCCTTCCGGCTGGCTGGTTTATTGCTGATAAATCTGGAGCCGG
TGAGCGTGGAAGCCGCGGTATCATTGCAGCACTGGGGCCAGATGGTAAGCCCTCCCGTATCGTAGTTATCTACA
CGACGGGGAGTCAGGCAACTATGGATGAACGAAATAGACAGATCGCTGAGATAGGTGCCTCACTGATTAAGCAT
TGGTAACTGTCAGACCAAGTTTACTCATATATACTTTAGATTGATTTAAAACTTCATTTTTAATTTAAAAGGATCTAG
GTGAAGATCCTTTTTGATAATCTCATGACCAAAATCCCTTAACGTGAGTTTTCGTTCCACTGAGCGTCAGACCCC
GTAGAAAAGATCAAAGGATCTTCTTGAGATCCTTTTTTTCTGCGCGTAATCTGCTGCTTGCAAACAAAAAAACCAC
CGCTACCAGCGGTGGTTTGTTTGCCGGATCAAGAGCTACCAACTCTTTTTCCGAAGGTAACTGGCTTCAGCAGA
GCGCAGATACCAAATACTGTTCTTCTAGTGTAGCCGTAGTTAGGCCACCACTTCAAGAACTCTGTAGCACCGCCT
ACATACCTCGCTCTGCTAATCCTGTTACCAGTGGCTGCTGCCAGTGGCGATAAGTCGTGTCTTACCGGGTTGGA
CTCAAGACGATAGTTACCGGATAAGGCGCAGCGGTCGGGCTGAACGGGGGGTTCGTGCACACAGCCCAGCTTG
GAGCGAACGACCTACACCGAACTGAGATACCTACAGCGTGAGCTATGAGAAAGCGCCACGCTTCCCGAAGGGA
GAAAGGCGGACAGGTATCCGGTAAGCGGCAGGGTCGGAACAGGAGAGCGCACGAGGGAGCTTCCAGGGGGA
AACGCCTGGTATCTTTATAGTCCTGTCGGGTTTCGCCACCTCTGACTTGAGCGTCGATTTTTGTGATGCTCGTCA
GGGGGGCGGAGCCTATGGAAAAACGCCAGCAACGCGGCCTTTTTACGGTTCCTGGCCTTTTGCTGGCCTTTTG
CTCACATGT
pAAV-CMV-sadCas9-U6gRNA(Kcnq2-sa_sgRNA6) used in in vitro qPCR experiments (SEQ ID NO: 86)
CCTGCAGGCAGCTGCGCGCTCGCTCGCTCACTGAGGCCGCCCGGGCGTCGGGCGACCTTTGGTCGCCCGGCC
TCAGTGAGCGAGCGAGCGCGCAGAGAGGGAGTGGCCAACTCCATCACTAGGGGTTCCTGCGGCCTCTAGACTC
GAGGCGTTGACATTGATTATTGACTAGTTATTAATAGTAATCAATTACGGGGTCATTAGTTCATAGCCCATATATG
GAGTTCCGCGTTACATAACTTACGGTAAATGGCCCGCCTGGCTGACCGCCCAACGACCCCCGCCCATTGACGT
CAATAATGACGTATGTTCCCATAGTAACGCCAATAGGGACTTTCCATTGACGTCAATGGGTGGAGTATTTACGGT
AAACTGCCCACTTGGCAGTACATCAAGTGTATCATATGCCAAGTACGCCCCCTATTGACGTCAATGACGGTAAAT
GGCCCGCCTGGCATTATGCCCAGTACATGACCTTATGGGACTTTCCTACTTGGCAGTACATCTACGTATTAGTCA
TCGCTATTACCATGGTGATGCGGTTTTGGCAGTACATCAATGGGCGTGGATAGCGGTTTGACTCACGGGGATTT
CCAAGTCTCCACCCCATTGACGTCAATGGGAGTTTGTTTTGGCACCAAAATCAACGGGACTTTCCAAAATGTCGT
AACAACTCCGCCCCATTGACGCAAATGGGCGGTAGGCGTGTACGGTGGGAGGTCTATATAAGCAGAGCTCTCT
GGCTAACTACCGGTGCCACCATGGCCCCAAAGAAGAAGCGGAAGGTCGGTATCCACGGAGTCCCAGCAGCCAA
GCGGAACTACATCCTGGGCCTGGCCATCGGCATCACCAGCGTGGGCTACGGCATCATCGACTACGAGACACGG
GACGTGATCGATGCCGGCGTGCGGCTGTTCAAAGAGGCCAACGTGGAAAACAACGAGGGCAGGCGGAGCAAG
AGAGGCGCCAGAAGGCTGAAGCGGCGGAGGCGGCATAGAATCCAGAGAGTGAAGAAGCTGCTGTTCGACTAC
AACCTGCTGACCGACCACAGCGAGCTGAGCGGCATCAACCCCTACGAGGCCAGAGTGAAGGGCCTGAGCCAG
AAGCTGAGCGAGGAAGAGTTCTCTGCCGCCCTGCTGCACCTGGCCAAGAGAAGAGGCGTGCACAACGTGAACG
AGGTGGAAGAGGACACCGGCAACGAGCTGTCCACCAAAGAGCAGATCAGCCGGAACAGCAAGGCCCTGGAAG
AGAAATACGTGGCCGAACTGCAGCTGGAACGGCTGAAGAAAGACGGCGAAGTGCGGGGCAGCATCAACAGATT
CAAGACCAGCGACTACGTGAAAGAAGCCAAACAGCTGCTGAAGGTGCAGAAGGCCTACCACCAGCTGGACCAG
AGCTTCATCGACACCTACATCGACCTGCTGGAAACCCGGCGGACCTACTATGAGGGACCTGGCGAGGGCAGCC
CCTTCGGCTGGAAGGACATCAAAGAATGGTACGAGATGCTGATGGGCCACTGCACCTACTTCCCCGAGGAACT
GCGGAGCGTGAAGTACGCCTACAACGCCGACCTGTACAACGCCCTGAACGACCTGAACAATCTCGTGATCACC
AGGGACGAGAACGAGAAGCTGGAATATTACGAGAAGTTCCAGATCATCGAGAACGTGTTCAAGCAGAAGAAGAA
GCCCACCCTGAAGCAGATCGCCAAAGAAATCCTCGTGAACGAAGAGGATATTAAGGGCTACAGAGTGACCAGCA
CCGGCAAGCCCGAGTTCACCAACCTGAAGGTGTACCACGACATCAAGGACATTACCGCCCGGAAAGAGATTATT
GAGAACGCCGAGCTGCTGGATCAGATTGCCAAGATCCTGACCATCTACCAGAGCAGCGAGGACATCCAGGAAG
AACTGACCAATCTGAACTCCGAGCTGACCCAGGAAGAGATCGAGCAGATCTCTAATCTGAAGGGCTATACCGGC
ACCCACAACCTGAGCCTGAAGGCCATCAACCTGATCCTGGACGAGCTGTGGCACACCAACGACAACCAGATCG
CTATCTTCAACCGGCTGAAGCTGGTGCCCAAGAAGGTGGACCTGTCCCAGCAGAAAGAGATCCCCACCACCCT
GGTGGACGACTTCATCCTGAGCCCCGTCGTGAAGAGAAGCTTCATCCAGAGCATCAAAGTGATCAACGCCATCA
TCAAGAAGTACGGCCTGCCCAACGACATCATTATCGAGCTGGCCCGCGAGAAGAACTCCAAGGACGCCCAGAA
AATGATCAACGAGATGCAGAAGCGGAACCGGCAGACCAACGAGCGGATCGAGGAAATCATCCGGACCACCGGC
AAAGAGAACGCCAAGTACCTGATCGAGAAGATCAAGCTGCACGACATGCAGGAAGGCAAGTGCCTGTACAGCC
TGGAAGCCATCCCTCTGGAAGATCTGCTGAACAACCCCTTCAACTATGAGGTGGACCACATCATCCCCAGAAGC
GTGTCCTTCGACAACAGCTTCAACAACAAGGTGCTCGTGAAGCAGGAAGAAGCCAGCAAGAAGGGCAACCGGA
CCCCATTCCAGTACCTGAGCAGCAGCGACAGCAAGATCAGCTACGAAACCTTCAAGAAGCACATCCTGAATCTG
GCCAAGGGCAAGGGCAGAATCAGCAAGACCAAGAAAGAGTATCTGCTGGAAGAACGGGACATCAACAGGTTCT
CCGTGCAGAAAGACTTCATCAACCGGAACCTGGTGGATACCAGATACGCCACCAGAGGCCTGATGAACCTGCT
GCGGAGCTACTTCAGAGTGAACAACCTGGACGTGAAAGTGAAGTCCATCAATGGCGGCTTCACCAGCTTTCTGC
GGCGGAAGTGGAAGTTTAAGAAAGAGCGGAACAAGGGGTACAAGCACCACGCCGAGGACGCCCTGATCATTGC
CAACGCCGATTTCATCTTCAAAGAGTGGAAGAAACTGGACAAGGCCAAAAAAGTGATGGAAAACCAGATGTTCG
AGGAAAAGCAGGCCGAGAGCATGCCCGAGATCGAAACCGAGCAGGAGTACAAAGAGATCTTCATCACCCCCCA
CCAGATCAAGCACATTAAGGACTTCAAGGACTACAAGTACAGCCACCGGGTGGACAAGAAGCCTAATAGAGAGC
TGATTAACGACACCCTGTACTCCACCCGGAAGGACGACAAGGGCAACACCCTGATCGTGAACAATCTGAACGGC
CTGTACGACAAGGACAATGACAAGCTGAAAAAGCTGATCAACAAGAGCCCCGAAAAGCTGCTGATGTACCACCA
CGACCCCCAGACCTACCAGAAACTGAAGCTGATTATGGAACAGTACGGCGACGAGAAGAATCCCCTGTACAAGT
ACTACGAGGAAACCGGGAACTACCTGACCAAGTACTCCAAAAAGGACAACGGCCCCGTGATCAAGAAGATTAAG
TATTACGGCAACAAACTGAACGCCCATCTGGACATCACCGACGACTACCCCAACAGCAGAAACAAGGTCGTGAA
GCTGTCCCTGAAGCCCTACAGATTCGACGTGTACCTGGACAATGGCGTGTACAAGTTCGTGACCGTGAAGAATC
TGGATGTGATCAAAAAAGAAAACTACTACGAAGTGAATAGCAAGTGCTATGAGGAAGCTAAGAAGCTGAAGAAGA
TCAGCAACCAGGCCGAGTTTATCGCCTCCTTCTACAACAACGATCTGATCAAGATCAACGGCGAGCTGTATAGA
GTGATCGGCGTGAACAACGACCTGCTGAACCGGATCGAAGTGAACATGATCGACATCACCTACCGCGAGTACCT
GGAAAACATGAACGACAAGAGGCCCCCCAGGATCATTAAGACAATCGCCTCCAAGACCCAGAGCATTAAGAAGT
ACAGCACAGACATTCTGGGCAACCTGTATGAAGTGAAATCTAAGAAGCACCCTCAGATCATCAAAAAGGGCAAAA
GGCCGGCGGCCACGAAAAAGGCCGGCCAGGCAAAAAAGAAAAAGGGATCCGGACGGGCTGACGCATTGGACG
ATTTTGATCTGGATATGCTGGGAAGTGACGCCCTCGATGATTTTGACCTTGACATGCTTGGTTCGGATGCCCTTG
ATGACTTTGACCTCGACATGCTCGGCAGTGACGCCCTTGATGATTTCGACCTGGACATGCTGATTAACTGTACAG
GCAGTGGAGAGGGCAGAGGAAGTCTGCTAACATGCGGTGACGTCGAGGAGAATCCTGGCCCAATGGCCAAGC
CTTTGTCTCAAGAAGAATCCACCCTCATTGAAAGAGCAACGGCTACAATCAACAGCATCCCCATCTCTGAAGACT
ACAGCGTCGCCAGCGCAGCTCTCTCTAGCGACGGCCGCATCTTCACTGGTGTCAATGTATATCATTTTACTGGG
GGACCTTGTGCAGAACTCGTGGTGCTGGGCACTGCTGCTGCTGCGGCAGCTGGCAACCTGACTTGTATCGTCG
CGATCGGAAATGAGAACAGGGGCATCTTGAGCCCCTGCGGACGGTGCCGACAGGTGCTTCTCGATCTGCATCC
TGGGATCAAAGCCATAGTGAAGGACAGTGATGGACAGCCGACGGCAGTTGGGATTCGTGAATTGCTGCCCTCT
GGTTATGTGTGGGAGGGCTAAGAATTCCTAGAGCTCGCTGATCAGCCTCGACTGTGCCTTCTAGTTGCCAGCCA
TCTGTTGTTTGCCCCTCCCCCGTGCCTTCCTTGACCCTGGAAGGTGCCACTCCCACTGTCCTTTCCTAATAAAAT
GAGGAAATTGCATCGCATTGTCTGAGTAGGTGTCATTCTATTCTGGGGGGTGGGGTGGGGCAGGACAGCAAGG
GGGAGGATTGGGAAGAGAATAGCAGGCATGCTGGGGAGGTACCGAGGGCCTATTTCCCATGATTCCTTCATATT
TGCATATACGATACAAGGCTGTTAGAGAGATAATTGGAATTAATTTGACTGTAAACACAAAGATATTAGTACAAAA
TACGTGACGTAGAAAGTAATAATTTCTTGGGTAGTTTGCAGTTTTAAAATTATGTTTTAAAATGGACTATCATATGC
TTACCGTAACTTGAAAGTATTTCGATTTCTTGGCTTTATATATCTTGTGGAAAGGACGAAAcaccTCCTAGCCCGGT
AATCCTTGAgTTTTAGTACTCTGGAAACAGAATCTACTAAAACAAGGCAAAATGCCGTGTTTATCTCGTCAACTTG
TTGGCGAGATTTTTGCGGCCGCAGGAACCCCTAGTGATGGAGTTGGCCACTCCCTCTCTGCGCGCTCGCTCGC
TCACTGAGGCCGGGCGACCAAAGGTCGCCCGACGCCCGGGCTTTGCCCGGGCGGCCTCAGTGAGCGAGCGA
GCGCGCAGCTGCCTGCAGGGGCGCCTGATGCGGTATTTTCTCCTTACGCATCTGTGCGGTATTTCACACCGCAT
ACGTCAAAGCAACCATAGTACGCGCCCTGTAGCGGCGCATTAAGCGCGGCGGGTGTGGTGGTTACGCGCAGC
GTGACCGCTACACTTGCCAGCGCCTTAGCGCCCGCTCCTTTCGCTTTCTTCCCTTCCTTTCTCGCCACGTTCGC
CGGCTTTCCCCGTCAAGCTCTAAATCGGGGGCTCCCTTTAGGGTTCCGATTTAGTGCTTTACGGCACCTCGACC
CCAAAAAACTTGATTTGGGTGATGGTTCACGTAGTGGGCCATCGCCCTGATAGACGGTTTTTCGCCCTTTGACGT
TGGAGTCCACGTTCTTTAATAGTGGACTCTTGTTCCAAACTGGAACAACACTCAACTCTATCTCGGGCTATTCTTT
TGATTTATAAGGGATTTTGCCGATTTCGGTCTATTGGTTAAAAAATGAGCTGATTTAACAAAAATTTAACGCGAATT
TTAACAAAATATTAACGTTTACAATTTTATGGTGCACTCTCAGTACAATCTGCTCTGATGCCGCATAGTTAAGCCA
GCCCCGACACCCGCCAACACCCGCTGACGCGCCCTGACGGGCTTGTCTGCTCCCGGCATCCGCTTACAGACAA
GCTGTGACCGTCTCCGGGAGCTGCATGTGTCAGAGGTTTTCACCGTCATCACCGAAACGCGCGAGACGAAAGG
GCCTCGTGATACGCCTATTTTTATAGGTTAATGTCATGATAATAATGGTTTCTTAGACGTCAGGTGGCACTTTTCG
GGGAAATGTGCGCGGAACCCCTATTTGTTTATTTTTCTAAATACATTCAAATATGTATCCGCTCATGAGACAATAA
CCCTGATAAATGCTTCAATAATATTGAAAAAGGAAGAGTATGAGTATTCAACATTTCCGTGTCGCCCTTATTCCCT
TTTTTGCGGCATTTTGCCTTCCTGTTTTTGCTCACCCAGAAACGCTGGTGAAAGTAAAAGATGCTGAAGATCAGTT
GGGTGCACGAGTGGGTTACATCGAACTGGATCTCAACAGCGGTAAGATCCTTGAGAGTTTTCGCCCCGAAGAAC
GTTTTCCAATGATGAGCACTTTTAAAGTTCTGCTATGTGGCGCGGTATTATCCCGTATTGACGCCGGGCAAGAGC
AACTCGGTCGCCGCATACACTATTCTCAGAATGACTTGGTTGAGTACTCACCAGTCACAGAAAAGCATCTTACGG
ATGGCATGACAGTAAGAGAATTATGCAGTGCTGCCATAACCATGAGTGATAACACTGCGGCCAACTTACTTCTGA
CAACGATCGGAGGACCGAAGGAGCTAACCGCTTTTTTGCACAACATGGGGGATCATGTAACTCGCCTTGATCGT
TGGGAACCGGAGCTGAATGAAGCCATACCAAACGACGAGCGTGACACCACGATGCCTGTAGCAATGGCAACAA
CGTTGCGCAAACTATTAACTGGCGAACTACTTACTCTAGCTTCCCGGCAACAATTAATAGACTGGATGGAGGCG
GATAAAGTTGCAGGACCACTTCTGCGCTCGGCCCTTCCGGCTGGCTGGTTTATTGCTGATAAATCTGGAGCCGG
TGAGCGTGGAAGCCGCGGTATCATTGCAGCACTGGGGCCAGATGGTAAGCCCTCCCGTATCGTAGTTATCTACA
CGACGGGGAGTCAGGCAACTATGGATGAACGAAATAGACAGATCGCTGAGATAGGTGCCTCACTGATTAAGCAT
TGGTAACTGTCAGACCAAGTTTACTCATATATACTTTAGATTGATTTAAAACTTCATTTTTAATTTAAAAGGATCTAG
GTGAAGATCCTTTTTGATAATCTCATGACCAAAATCCCTTAACGTGAGTTTTCGTTCCACTGAGCGTCAGACCCC
GTAGAAAAGATCAAAGGATCTTCTTGAGATCCTTTTTTTCTGCGCGTAATCTGCTGCTTGCAAACAAAAAAACCAC
CGCTACCAGCGGTGGTTTGTTTGCCGGATCAAGAGCTACCAACTCTTTTTCCGAAGGTAACTGGCTTCAGCAGA
GCGCAGATACCAAATACTGTTCTTCTAGTGTAGCCGTAGTTAGGCCACCACTTCAAGAACTCTGTAGCACCGCCT
ACATACCTCGCTCTGCTAATCCTGTTACCAGTGGCTGCTGCCAGTGGCGATAAGTCGTGTCTTACCGGGTTGGA
CTCAAGACGATAGTTACCGGATAAGGCGCAGCGGTCGGGCTGAACGGGGGGTTCGTGCACACAGCCCAGCTTG
GAGCGAACGACCTACACCGAACTGAGATACCTACAGCGTGAGCTATGAGAAAGCGCCACGCTTCCCGAAGGGA
GAAAGGCGGACAGGTATCCGGTAAGCGGCAGGGTCGGAACAGGAGAGCGCACGAGGGAGCTTCCAGGGGGA
AACGCCTGGTATCTTTATAGTCCTGTCGGGTTTCGCCACCTCTGACTTGAGCGTCGATTTTTGTGATGCTCGTCA
GGGGGGCGGAGCCTATGGAAAAACGCCAGCAACGCGGCCTTTTTACGGTTCCTGGCCTTTTGCTGGCCTTTTG
CTCACATGT
1. 6 KCNQ3
Nucleotide sequence of sasgRNA for mouse KCNQ3; sgRNA1 (SEQ ID NO: 87)
AGCGGGGCTAGGGCTAGAGCA
Nucleotide sequence of sasgRNA for mouse KCNQ3; sgRNA2 (SEQ ID NO: 88)
GCTGCTGCTACTGCCGCTGCA
Nucleotide sequence of sasgRNA for mouse KCNQ3; sgRNA3 (SEQ ID NO: 89)
CTACTGCCGCTGCAGCGGGGC
pAAV-CMV-sadCas9-U6gRNA(Kcnq3-sa_sgRNA1) used in in vitro qPCR experiments (SEQ ID NO: 90)
CCTGCAGGCAGCTGCGCGCTCGCTCGCTCACTGAGGCCGCCCGGGCGTCGGGCGACCTTTGGTCGCCCGGCC
TCAGTGAGCGAGCGAGCGCGCAGAGAGGGAGTGGCCAACTCCATCACTAGGGGTTCCTGCGGCCTCTAGACTC
GAGGCGTTGACATTGATTATTGACTAGTTATTAATAGTAATCAATTACGGGGTCATTAGTTCATAGCCCATATATG
GAGTTCCGCGTTACATAACTTACGGTAAATGGCCCGCCTGGCTGACCGCCCAACGACCCCCGCCCATTGACGT
CAATAATGACGTATGTTCCCATAGTAACGCCAATAGGGACTTTCCATTGACGTCAATGGGTGGAGTATTTACGGT
AAACTGCCCACTTGGCAGTACATCAAGTGTATCATATGCCAAGTACGCCCCCTATTGACGTCAATGACGGTAAAT
GGCCCGCCTGGCATTATGCCCAGTACATGACCTTATGGGACTTTCCTACTTGGCAGTACATCTACGTATTAGTCA
TCGCTATTACCATGGTGATGCGGTTTTGGCAGTACATCAATGGGCGTGGATAGCGGTTTGACTCACGGGGATTT
CCAAGTCTCCACCCCATTGACGTCAATGGGAGTTTGTTTTGGCACCAAAATCAACGGGACTTTCCAAAATGTCGT
AACAACTCCGCCCCATTGACGCAAATGGGGGGTAGGCGTGTACGGTGGGAGGTCTATATAAGCAGAGCTCTCT
GGCTAACTACCGGTGCCACCATGGCCCCAAAGAAGAAGCGGAAGGTCGGTATCCACGGAGTCCCAGCAGCCAA
GCGGAACTACATCCTGGGCCTGGCCATCGGCATCACCAGCGTGGGCTACGGCATCATCGACTACGAGACACGG
GACGTGATCGATGCCGGCGTGCGGCTGTTCAAAGAGGCCAACGTGGAAAACAACGAGGGCAGGCGGAGCAAG
AGAGGCGCCAGAAGGCTGAAGCGGCGGAGGCGGCATAGAATCCAGAGAGTGAAGAAGCTGCTGTTCGACTAC
AACCTGCTGACCGACCACAGCGAGCTGAGCGGCATCAACCCCTACGAGGCCAGAGTGAAGGGCCTGAGCCAG
AAGCTGAGCGAGGAAGAGTTCTCTGCCGCCCTGCTGCACCTGGCCAAGAGAAGAGGCGTGCACAACGTGAACG
AGGTGGAAGAGGACACCGGCAACGAGCTGTCCACCAAAGAGCAGATCAGCCGGAACAGCAAGGCCCTGGAAG
AGAAATACGTGGCCGAACTGCAGCTGGAACGGCTGAAGAAAGACGGCGAAGTGCGGGGCAGCATCAACAGATT
CAAGACCAGCGACTACGTGAAAGAAGCCAAACAGCTGCTGAAGGTGCAGAAGGCCTACCACCAGCTGGACCAG
AGCTTCATCGACACCTACATCGACCTGCTGGAAACCCGGCGGACCTACTATGAGGGACCTGGCGAGGGCAGCC
CCTTCGGCTGGAAGGACATCAAAGAATGGTACGAGATGCTGATGGGCCACTGCACCTACTTCCCCGAGGAACT
GCGGAGCGTGAAGTACGCCTACAACGCCGACCTGTACAACGCCCTGAACGACCTGAACAATCTCGTGATCACC
AGGGACGAGAACGAGAAGCTGGAATATTACGAGAAGTTCCAGATCATCGAGAACGTGTTCAAGCAGAAGAAGAA
GCCCACCCTGAAGCAGATCGCCAAAGAAATCCTCGTGAACGAAGAGGATATTAAGGGCTACAGAGTGACCAGCA
CCGGCAAGCCCGAGTTCACCAACCTGAAGGTGTACCACGACATCAAGGACATTACCGCCCGGAAAGAGATTATT
GAGAACGCCGAGCTGCTGGATCAGATTGCCAAGATCCTGACCATCTACCAGAGCAGCGAGGACATCCAGGAAG
AACTGACCAATCTGAACTCCGAGCTGACCCAGGAAGAGATCGAGCAGATCTCTAATCTGAAGGGCTATACCGGC
ACCCACAACCTGAGCCTGAAGGCCATCAACCTGATCCTGGACGAGCTGTGGCACACCAACGACAACCAGATCG
CTATCTTCAACCGGCTGAAGCTGGTGCCCAAGAAGGTGGACCTGTCCCAGCAGAAAGAGATCCCCACCACCCT
GGTGGACGACTTCATCCTGAGCCCCGTCGTGAAGAGAAGCTTCATCCAGAGCATCAAAGTGATCAACGCCATCA
TCAAGAAGTACGGCCTGCCCAACGACATCATTATCGAGCTGGCCCGCGAGAAGAACTCCAAGGACGCCCAGAA
AATGATCAACGAGATGCAGAAGCGGAACCGGCAGACCAACGAGCGGATCGAGGAAATCATCCGGACCACCGGC
AAAGAGAACGCCAAGTACCTGATCGAGAAGATCAAGCTGCACGACATGCAGGAAGGCAAGTGCCTGTACAGCC
TGGAAGCCATCCCTCTGGAAGATCTGCTGAACAACCCCTTCAACTATGAGGTGGACCACATCATCCCCAGAAGC
GTGTCCTTCGACAACAGCTTCAACAACAAGGTGCTCGTGAAGCAGGAAGAAGCCAGCAAGAAGGGCAACCGGA
CCCCATTCCAGTACCTGAGCAGCAGCGACAGCAAGATCAGCTACGAAACCTTCAAGAAGCACATCCTGAATCTG
GCCAAGGGCAAGGGCAGAATCAGCAAGACCAAGAAAGAGTATCTGCTGGAAGAACGGGACATCAACAGGTTCT
CCGTGCAGAAAGACTTCATCAACCGGAACCTGGTGGATACCAGATACGCCACCAGAGGCCTGATGAACCTGCT
GCGGAGCTACTTCAGAGTGAACAACCTGGACGTGAAAGTGAAGTCCATCAATGGCGGCTTCACCAGCTTTCTGC
GGCGGAAGTGGAAGTTTAAGAAAGAGCGGAACAAGGGGTACAAGCACCACGCCGAGGACGCCCTGATCATTGC
CAACGCCGATTTCATCTTCAAAGAGTGGAAGAAACTGGACAAGGCCAAAAAAGTGATGGAAAACCAGATGTTCG
AGGAAAAGCAGGCCGAGAGCATGCCCGAGATCGAAACCGAGCAGGAGTACAAAGAGATCTTCATCACCCCCCA
CCAGATCAAGCACATTAAGGACTTCAAGGACTACAAGTACAGCCACCGGGTGGACAAGAAGCCTAATAGAGAGC
TGATTAACGACACCCTGTACTCCACCCGGAAGGACGACAAGGGCAACACCCTGATCGTGAACAATCTGAACGGC
CTGTACGACAAGGACAATGACAAGCTGAAAAAGCTGATCAACAAGAGCCCCGAAAAGCTGCTGATGTACCACCA
CGACCCCCAGACCTACCAGAAACTGAAGCTGATTATGGAACAGTACGGCGACGAGAAGAATCCCCTGTACAAGT
ACTACGAGGAAACCGGGAACTACCTGACCAAGTACTCCAAAAAGGACAACGGCCCCGTGATCAAGAAGATTAAG
TATTACGGCAACAAACTGAACGCCCATCTGGACATCACCGACGACTACCCCAACAGCAGAAACAAGGTCGTGAA
GCTGTCCCTGAAGCCCTACAGATTCGACGTGTACCTGGACAATGGCGTGTACAAGTTCGTGACCGTGAAGAATC
TGGATGTGATCAAAAAAGAAAACTACTACGAAGTGAATAGCAAGTGCTATGAGGAAGCTAAGAAGCTGAAGAAGA
TCAGCAACCAGGCCGAGTTTATCGCCTCCTTCTACAACAACGATCTGATCAAGATCAACGGCGAGCTGTATAGA
GTGATCGGCGTGAACAACGACCTGCTGAACCGGATCGAAGTGAACATGATCGACATCACCTACCGCGAGTACCT
GGAAAACATGAACGACAAGAGGCCCCCCAGGATCATTAAGACAATCGCCTCCAAGACCCAGAGCATTAAGAAGT
ACAGCACAGACATTCTGGGCAACCTGTATGAAGTGAAATCTAAGAAGCACCCTCAGATCATCAAAAAGGGCAAAA
GGCCGGCGGCCACGAAAAAGGCCGGCCAGGCAAAAAAGAAAAAGGGATCCGGACGGGCTGACGCATTGGACG
ATTTTGATCTGGATATGCTGGGAAGTGACGCCCTCGATGATTTTGACCTTGACATGCTTGGTTCGGATGCCCTTG
ATGACTTTGACCTCGACATGCTCGGCAGTGACGCCCTTGATGATTTCGACCTGGACATGCTGATTAACTGTACAG
GCAGTGGAGAGGGCAGAGGAAGTCTGCTAACATGCGGTGACGTCGAGGAGAATCCTGGCCCAATGGCCAAGC
CTTTGTCTCAAGAAGAATCCACCCTCATTGAAAGAGCAACGGCTACAATCAACAGCATCCCCATCTCTGAAGACT
ACAGCGTCGCCAGCGCAGCTCTCTCTAGCGACGGCCGCATCTTCACTGGTGTCAATGTATATCATTTTACTGGG
GGACCTTGTGCAGAACTCGTGGTGCTGGGCACTGCTGCTGCTGCGGCAGCTGGCAACCTGACTTGTATCGTCG
CGATCGGAAATGAGAACAGGGGCATCTTGAGCCCCTGCGGACGGTGCCGACAGGTGCTTCTCGATCTGCATCC
TGGGATCAAAGCCATAGTGAAGGACAGTGATGGACAGCCGACGGCAGTTGGGATTCGTGAATTGCTGCCCTCT
GGTTATGTGTGGGAGGGCTAAGAATTCCTAGAGCTCGCTGATCAGCCTCGACTGTGCCTTCTAGTTGCCAGCCA
TCTGTTGTTTGCCCCTCCCCCGTGCCTTCCTTGACCCTGGAAGGTGCCACTCCCACTGTCCTTTCCTAATAAAAT
GAGGAAATTGCATCGCATTGTCTGAGTAGGTGTCATTCTATTCTGGGGGGTGGGGTGGGGCAGGACAGCAAGG
GGGAGGATTGGGAAGAGAATAGCAGGCATGCTGGGGAGGTACCGAGGGCCTATTTCCCATGATTCCTTCATATT
TGCATATACGATACAAGGCTGTTAGAGAGATAATTGGAATTAATTTGACTGTAAACACAAAGATATTAGTACAAAA
TACGTGACGTAGAAAGTAATAATTTCTTGGGTAGTTTGCAGTTTTAAAATTATGTTTTAAAATGGACTATCATATGC
TTACCGTAACTTGAAAGTATTTCGATTTCTTGGCTTTATATATCTTGTGGAAAGGACGAAAcaccgAGCGGGGCTAG
GGCTAGAGCAgTTTTAGTACTCTGGAAACAGAATCTACTAAAACAAGGCAAAATGCCGTGTTTATCTCGTCAACTT
GTTGGCGAGATTTTTGCGGCCGCAGGAACCCCTAGTGATGGAGTTGGCCACTCCCTCTCTGCGCGCTCGCTCG
CTCACTGAGGCCGGGCGACCAAAGGTCGCCCGACGCCCGGGCTTTGCCCGGGCGGCCTCAGTGAGCGAGCG
AGCGCGCAGCTGCCTGCAGGGGCGCCTGATGCGGTATTTTCTCCTTACGCATCTGTGCGGTATTTCACACCGCA
TACGTCAAAGCAACCATAGTACGCGCCCTGTAGCGGCGCATTAAGCGCGGCGGGTGTGGTGGTTACGCGCAGC
GTGACCGCTACACTTGCCAGCGCCTTAGCGCCCGCTCCTTTCGCTTTCTTCCCTTCCTTTCTCGCCACGTTCGC
CGGCTTTCCCCGTCAAGCTCTAAATCGGGGGCTCCCTTTAGGGTTCCGATTTAGTGCTTTACGGCACCTCGACC
CCAAAAAACTTGATTTGGGTGATGGTTCACGTAGTGGGCCATCGCCCTGATAGACGGTTTTTCGCCCTTTGACGT
TGGAGTCCACGTTCTTTAATAGTGGACTCTTGTTCCAAACTGGAACAACACTCAACTCTATCTCGGGCTATTCTTT
TGATTTATAAGGGATTTTGCCGATTTCGGTCTATTGGTTAAAAAATGAGCTGATTTAACAAAAATTTAACGCGAATT
TTAACAAAATATTAACGTTTACAATTTTATGGTGCACTCTCAGTACAATCTGCTCTGATGCCGCATAGTTAAGCCA
GCCCCGACACCCGCCAACACCCGCTGACGCGCCCTGACGGGCTTGTCTGCTCCCGGCATCCGCTTACAGACAA
GCTGTGACCGTCTCCGGGAGCTGCATGTGTCAGAGGTTTTCACCGTCATCACCGAAACGCGCGAGACGAAAGG
GCCTCGTGATACGCCTATTTTTATAGGTTAATGTCATGATAATAATGGTTTCTTAGACGTCAGGTGGCACTTTTCG
GGGAAATGTGCGCGGAACCCCTATTTGTTTATTTTTCTAAATACATTCAAATATGTATCCGCTCATGAGACAATAA
CCCTGATAAATGCTTCAATAATATTGAAAAAGGAAGAGTATGAGTATTCAACATTTCCGTGTCGCCCTTATTCCCT
TTTTTGCGGCATTTTGCCTTCCTGTTTTTGCTCACCCAGAAACGCTGGTGAAAGTAAAAGATGCTGAAGATCAGTT
GGGTGCACGAGTGGGTTACATCGAACTGGATCTCAACAGCGGTAAGATCCTTGAGAGTTTTCGCCCCGAAGAAC
GTTTTCCAATGATGAGCACTTTTAAAGTTCTGCTATGTGGCGCGGTATTATCCCGTATTGACGCCGGGCAAGAGC
AACTCGGTCGCCGCATACACTATTCTCAGAATGACTTGGTTGAGTACTCACCAGTCACAGAAAAGCATCTTACGG
ATGGCATGACAGTAAGAGAATTATGCAGTGCTGCCATAACCATGAGTGATAACACTGCGGCCAACTTACTTCTGA
CAACGATCGGAGGACCGAAGGAGCTAACCGCTTTTTTGCACAACATGGGGGATCATGTAACTCGCCTTGATCGT
TGGGAACCGGAGCTGAATGAAGCCATACCAAACGACGAGCGTGACACCACGATGCCTGTAGCAATGGCAACAA
CGTTGCGCAAACTATTAACTGGCGAACTACTTACTCTAGCTTCCCGGCAACAATTAATAGACTGGATGGAGGCG
GATAAAGTTGCAGGACCACTTCTGCGCTCGGCCCTTCCGGCTGGCTGGTTTATTGCTGATAAATCTGGAGCCGG
TGAGCGTGGAAGCCGCGGTATCATTGCAGCACTGGGGCCAGATGGTAAGCCCTCCCGTATCGTAGTTATCTACA
CGACGGGGAGTCAGGCAACTATGGATGAACGAAATAGACAGATCGCTGAGATAGGTGCCTCACTGATTAAGCAT
TGGTAACTGTCAGACCAAGTTTACTCATATATACTTTAGATTGATTTAAAACTTCATTTTTAATTTAAAAGGATCTAG
GTGAAGATCCTTTTTGATAATCTCATGACCAAAATCCCTTAACGTGAGTTTTCGTTCCACTGAGCGTCAGACCCC
GTAGAAAAGATCAAAGGATCTTCTTGAGATCCTTTTTTTCTGCGCGTAATCTGCTGCTTGCAAACAAAAAAACCAC
CGCTACCAGCGGTGGTTTGTTTGCCGGATCAAGAGCTACCAACTCTTTTTCCGAAGGTAACTGGCTTCAGCAGA
GCGCAGATACCAAATACTGTTCTTCTAGTGTAGCCGTAGTTAGGCCACCACTTCAAGAACTCTGTAGCACCGCCT
ACATACCTCGCTCTGCTAATCCTGTTACCAGTGGCTGCTGCCAGTGGCGATAAGTCGTGTCTTACCGGGTTGGA
CTCAAGACGATAGTTACCGGATAAGGCGCAGCGGTCGGGCTGAACGGGGGGTTCGTGCACACAGCCCAGCTTG
GAGCGAACGACCTACACCGAACTGAGATACCTACAGCGTGAGCTATGAGAAAGCGCCACGCTTCCCGAAGGGA
GAAAGGCGGACAGGTATCCGGTAAGCGGCAGGGTCGGAACAGGAGAGCGCACGAGGGAGCTTCCAGGGGGA
AACGCCTGGTATCTTTATAGTCCTGTCGGGTTTCGCCACCTCTGACTTGAGCGTCGATTTTTGTGATGCTCGTCA
GGGGGGCGGAGCCTATGGAAAAACGCCAGCAACGCGGCCTTTTTACGGTTCCTGGCCTTTTGCTGGCCTTTTG
CTCACATGT
pAAV-CMV-sadCas9-U6gRNA(Kcnq3-sa_sgRNA2) used in in vitro qPCR experiments (SEQ ID NO: 91)
CCTGCAGGCAGCTGCGCGCTCGCTCGCTCACTGAGGCCGCCCGGGCGTCGGGCGACCTTTGGTCGCCCGGCC
TCAGTGAGCGAGCGAGCGCGCAGAGAGGGAGTGGCCAACTCCATCACTAGGGGTTCCTGCGGCCTCTAGACTC
GAGGCGTTGACATTGATTATTGACTAGTTATTAATAGTAATCAATTACGGGGTCATTAGTTCATAGCCCATATATG
GAGTTCCGCGTTACATAACTTACGGTAAATGGCCCGCCTGGCTGACCGCCCAACGACCCCCGCCCATTGACGT
CAATAATGACGTATGTTCCCATAGTAACGCCAATAGGGACTTTCCATTGACGTCAATGGGTGGAGTATTTACGGT
AAACTGCCCACTTGGCAGTACATCAAGTGTATCATATGCCAAGTACGCCCCCTATTGACGTCAATGACGGTAAAT
GGCCCGCCTGGCATTATGCCCAGTACATGACCTTATGGGACTTTCCTACTTGGCAGTACATCTACGTATTAGTCA
TCGCTATTACCATGGTGATGCGGTTTTGGCAGTACATCAATGGGCGTGGATAGCGGTTTGACTCACGGGGATTT
CCAAGTCTCCACCCCATTGACGTCAATGGGAGTTTGTTTTGGCACCAAAATCAACGGGACTTTCCAAAATGTCGT
AACAACTCCGCCCCATTGACGCAAATGGGGGTAGGCGTGTACGGTGGGAGGTCTATATAAGCAGAGCTCTCT
GGCTAACTACCGGTGCCACCATGGCCCCAAAGAAGAAGCGGAAGGTCGGTATCCACGGAGTCCCAGCAGCCAA
GCGGAACTACATCCTGGGCCTGGCCATCGGCATCACCAGCGTGGGCTACGGCATCATCGACTACGAGACACGG
GACGTGATCGATGCCGGCGTGCGGCTGTTCAAAGAGGCCAACGTGGAAAACAACGAGGGCAGGCGGAGCAAG
AGAGGCGCCAGAAGGCTGAAGCGGCGGAGGCGGCATAGAATCCAGAGAGTGAAGAAGCTGCTGTTCGACTAC
AACCTGCTGACCGACCACAGCGAGCTGAGCGGCATCAACCCCTACGAGGCCAGAGTGAAGGGCCTGAGCCAG
AAGCTGAGCGAGGAAGAGTTCTCTGCCGCCCTGCTGCACCTGGCCAAGAGAAGAGGCGTGCACAACGTGAACG
AGGTGGAAGAGGACACCGGCAACGAGCTGTCCACCAAAGAGCAGATCAGCCGGAACAGCAAGGCCCTGGAAG
AGAAATACGTGGCCGAACTGCAGCTGGAACGGCTGAAGAAAGACGGCGAAGTGCGGGGCAGCATCAACAGATT
CAAGACCAGCGACTACGTGAAAGAAGCCAAACAGCTGCTGAAGGTGCAGAAGGCCTACCACCAGCTGGACCAG
AGCTTCATCGACACCTACATCGACCTGCTGGAAACCCGGCGGACCTACTATGAGGGACCTGGCGAGGGCAGCC
CCTTCGGCTGGAAGGACATCAAAGAATGGTACGAGATGCTGATGGGCCACTGCACCTACTTCCCCGAGGAACT
GCGGAGCGTGAAGTACGCCTACAACGCCGACCTGTACAACGCCCTGAACGACCTGAACAATCTCGTGATCACC
AGGGACGAGAACGAGAAGCTGGAATATTACGAGAAGTTCCAGATCATCGAGAACGTGTTCAAGCAGAAGAAGAA
GCCCACCCTGAAGCAGATCGCCAAAGAAATCCTCGTGAACGAAGAGGATATTAAGGGCTACAGAGTGACCAGCA
CCGGCAAGCCCGAGTTCACCAACCTGAAGGTGTACCACGACATCAAGGACATTACCGCCCGGAAAGAGATTATT
GAGAACGCCGAGCTGCTGGATCAGATTGCCAAGATCCTGACCATCTACCAGAGCAGCGAGGACATCCAGGAAG
AACTGACCAATCTGAACTCCGAGCTGACCCAGGAAGAGATCGAGCAGATCTCTAATCTGAAGGGCTATACCGGC
ACCCACAACCTGAGCCTGAAGGCCATCAACCTGATCCTGGACGAGCTGTGGCACACCAACGACAACCAGATCG
CTATCTTCAACCGGCTGAAGCTGGTGCCCAAGAAGGTGGACCTGTCCCAGCAGAAAGAGATCCCCACCACCCT
GGTGGACGACTTCATCCTGAGCCCCGTCGTGAAGAGAAGCTTCATCCAGAGCATCAAAGTGATCAACGCCATCA
TCAAGAAGTACGGCCTGCCCAACGACATCATTATCGAGCTGGCCCGCGAGAAGAACTCCAAGGACGCCCAGAA
AATGATCAACGAGATGCAGAAGCGGAACCGGCAGACCAACGAGCGGATCGAGGAAATCATCCGGACCACCGGC
AAAGAGAACGCCAAGTACCTGATCGAGAAGATCAAGCTGCACGACATGCAGGAAGGCAAGTGCCTGTACAGCC
TGGAAGCCATCCCTCTGGAAGATCTGCTGAACAACCCCTTCAACTATGAGGTGGACCACATCATCCCCAGAAGC
GTGTCCTTCGACAACAGCTTCAACAACAAGGTGCTCGTGAAGCAGGAAGAAGCCAGCAAGAAGGGCAACCGGA
CCCCATTCCAGTACCTGAGCAGCAGCGACAGCAAGATCAGCTACGAAACCTTCAAGAAGCACATCCTGAATCTG
GCCAAGGGCAAGGGCAGAATCAGCAAGACCAAGAAAGAGTATCTGCTGGAAGAACGGGACATCAACAGGTTCT
CCGTGCAGAAAGACTTCATCAACCGGAACCTGGTGGATACCAGATACGCCACCAGAGGCCTGATGAACCTGCT
GCGGAGCTACTTCAGAGTGAACAACCTGGACGTGAAAGTGAAGTCCATCAATGGCGGCTTCACCAGCTTTCTGC
GGCGGAAGTGGAAGTTTAAGAAAGAGCGGAACAAGGGGTACAAGCACCACGCCGAGGACGCCCTGATCATTGC
CAACGCCGATTTCATCTTCAAAGAGTGGAAGAAACTGGACAAGGCCAAAAAAGTGATGGAAAACCAGATGTTCG
AGGAAAAGCAGGCCGAGAGCATGCCCGAGATCGAAACCGAGCAGGAGTACAAAGAGATCTTCATCACCCCCCA
CCAGATCAAGCACATTAAGGACTTCAAGGACTACAAGTACAGCCACCGGGTGGACAAGAAGCCTAATAGAGAGC
TGATTAACGACACCCTGTACTCCACCCGGAAGGACGACAAGGGCAACACCCTGATCGTGAACAATCTGAACGGC
CTGTACGACAAGGACAATGACAAGCTGAAAAAGCTGATCAACAAGAGCCCCGAAAAGCTGCTGATGTACCACCA
CGACCCCCAGACCTACCAGAAACTGAAGCTGATTATGGAACAGTACGGCGACGAGAAGAATCCCCTGTACAAGT
ACTACGAGGAAACCGGGAACTACCTGACCAAGTACTCCAAAAAGGACAACGGCCCCGTGATCAAGAAGATTAAG
TATTACGGCAACAAACTGAACGCCCATCTGGACATCACCGACGACTACCCCAACAGCAGAAACAAGGTCGTGAA
GCTGTCCCTGAAGCCCTACAGATTCGACGTGTACCTGGACAATGGCGTGTACAAGTTCGTGACCGTGAAGAATC
TGGATGTGATCAAAAAAGAAAACTACTACGAAGTGAATAGCAAGTGCTATGAGGAAGCTAAGAAGCTGAAGAAGA
TCAGCAACCAGGCCGAGTTTATCGCCTCCTTCTACAACAACGATCTGATCAAGATCAACGGCGAGCTGTATAGA
GTGATCGGCGTGAACAACGACCTGCTGAACCGGATCGAAGTGAACATGATCGACATCACCTACCGCGAGTACCT
GGAAAACATGAACGACAAGAGGCCCCCCAGGATCATTAAGACAATCGCCTCCAAGACCCAGAGCATTAAGAAGT
ACAGCACAGACATTCTGGGCAACCTGTATGAAGTGAAATCTAAGAAGCACCCTCAGATCATCAAAAAGGGCAAAA
GGCCGGCGGCCACGAAAAAGGCCGGCCAGGCAAAAAAGAAAAAGGGATCCGGACGGGCTGACGCATTGGACG
ATTTTGATCTGGATATGCTGGGAAGTGACGCCCTCGATGATTTTGACCTTGACATGCTTGGTTCGGATGCCCTTG
ATGACTTTGACCTCGACATGCTCGGCAGTGACGCCCTTGATGATTTCGACCTGGACATGCTGATTAACTGTACAG
GCAGTGGAGAGGGCAGAGGAAGTCTGCTAACATGCGGTGACGTCGAGGAGAATCCTGGCCCAATGGCCAAGC
CTTTGTCTCAAGAAGAATCCACCCTCATTGAAAGAGCAACGGCTACAATCAACAGCATCCCCATCTCTGAAGACT
ACAGCGTCGCCAGCGCAGCTCTCTCTAGCGACGGCCGCATCTTCACTGGTGTCAATGTATATCATTTTACTGGG
GGACCTTGTGCAGAACTCGTGGTGCTGGGCACTGCTGCTGCTGCGGCAGCTGGCAACCTGACTTGTATCGTCG
CGATCGGAAATGAGAACAGGGGCATCTTGAGCCCCTGCGGACGGTGCCGACAGGTGCTTCTCGATCTGCATCC
TGGGATCAAAGCCATAGTGAAGGACAGTGATGGACAGCCGACGGCAGTTGGGATTCGTGAATTGCTGCCCTCT
GGTTATGTGTGGGAGGGCTAAGAATTCCTAGAGCTCGCTGATCAGCCTCGACTGTGCCTTCTAGTTGCCAGCCA
TCTGTTGTTTGCCCCTCCCCCGTGCCTTCCTTGACCCTGGAAGGTGCCACTCCCACTGTCCTTTCCTAATAAAAT
GAGGAAATTGCATCGCATTGTCTGAGTAGGTGTCATTCTATTCTGGGGGGTGGGGTGGGGCAGGACAGCAAGG
GGGAGGATTGGGAAGAGAATAGCAGGCATGCTGGGGAGGTACCGAGGGCCTATTTCCCATGATTCCTTCATATT
TGCATATACGATACAAGGCTGTTAGAGAGATAATTGGAATTAATTTGACTGTAAACACAAAGATATTAGTACAAAA
TACGTGACGTAGAAAGTAATAATTTCTTGGGTAGTTTGCAGTTTTAAAATTATGTTTTAAAATGGACTATCATATGC
TTACCGTAACTTGAAAGTATTTCGATTTCTTGGCTTTATATATCTTGTGGAAAGGACGAAAcaccgGCTGCTGCTAC
TGCCGCTGCAgTTTTAGTACTCTGGAAACAGAATCTACTAAAACAAGGCAAAATGCCGTGTTTATCTCGTCAACTT
GTTGGCGAGATTTTTGCGGCCGCAGGAACCCCTAGTGATGGAGTTGGCCACTCCCTCTCTGCGCGCTCGCTCG
CTCACTGAGGCCGGGCGACCAAAGGTCGCCCGACGCCCGGGCTTTGCCCGGGCGGCCTCAGTGAGCGAGCG
AGCGCGCAGCTGCCTGCAGGGGCGCCTGATGCGGTATTTTCTCCTTACGCATCTGTGCGGTATTTCACACCGCA
TACGTCAAAGCAACCATAGTACGCGCCCTGTAGCGGCGCATTAAGCGCGGCGGGTGTGGTGGTTACGCGCAGC
GTGACCGCTACACTTGCCAGCGCCTTAGCGCCCGCTCCTTTCGCTTTCTTCCCTTCCTTTCTCGCCACGTTCGC
CGGCTTTCCCCGTCAAGCTCTAAATCGGGGGCTCCCTTTAGGGTTCCGATTTAGTGCTTTACGGCACCTCGACC
CCAAAAAACTTGATTTGGGTGATGGTTCACGTAGTGGGCCATCGCCCTGATAGACGGTTTTTCGCCCTTTGACGT
TGGAGTCCACGTTCTTTAATAGTGGACTCTTGTTCCAAACTGGAACAACACTCAACTCTATCTCGGGCTATTCTTT
TGATTTATAAGGGATTTTGCCGATTTCGGTCTATTGGTTAAAAAATGAGCTGATTTAACAAAAATTTAACGCGAATT
TTAACAAAATATTAACGTTTACAATTTTATGGTGCACTCTCAGTACAATCTGCTCTGATGCCGCATAGTTAAGCCA
GCCCCGACACCCGCCAACACCCGCTGACGCGCCCTGACGGGCTTGTCTGCTCCCGGCATCCGCTTACAGACAA
GCTGTGACCGTCTCCGGGAGCTGCATGTGTCAGAGGTTTTCACCGTCATCACCGAAACGCGCGAGACGAAAGG
GCCTCGTGATACGCCTATTTTTATAGGTTAATGTCATGATAATAATGGTTTCTTAGACGTCAGGTGGCACTTTTCG
GGGAAATGTGCGCGGAACCCCTATTTGTTTATTTTTCTAAATACATTCAAATATGTATCCGCTCATGAGACAATAA
CCCTGATAAATGCTTCAATAATATTGAAAAAGGAAGAGTATGAGTATTCAACATTTCCGTGTCGCCCTTATTCCCT
TTTTTGCGGCATTTTGCCTTCCTGTTTTTGCTCACCCAGAAACGCTGGTGAAAGTAAAAGATGCTGAAGATCAGTT
GGGTGCACGAGTGGGTTACATCGAACTGGATCTCAACAGCGGTAAGATCCTTGAGAGTTTTCGCCCCGAAGAAC
GTTTTCCAATGATGAGCACTTTTAAAGTTCTGCTATGTGGCGCGGTATTATCCCGTATTGACGCCGGGCAAGAGC
AACTCGGTCGCCGCATACACTATTCTCAGAATGACTTGGTTGAGTACTCACCAGTCACAGAAAAGCATCTTACGG
ATGGCATGACAGTAAGAGAATTATGCAGTGCTGCCATAACCATGAGTGATAACACTGCGGCCAACTTACTTCTGA
CAACGATCGGAGGACCGAAGGAGCTAACCGCTTTTTTGCACAACATGGGGGATCATGTAACTCGCCTTGATCGT
TGGGAACCGGAGCTGAATGAAGCCATACCAAACGACGAGCGTGACACCACGATGCCTGTAGCAATGGCAACAA
CGTTGCGCAAACTATTAACTGGCGAACTACTTACTCTAGCTTCCCGGCAACAATTAATAGACTGGATGGAGGCG
GATAAAGTTGCAGGACCACTTCTGCGCTCGGCCCTTCCGGCTGGCTGGTTTATTGCTGATAAATCTGGAGCCGG
TGAGCGTGGAAGCCGCGGTATCATTGCAGCACTGGGGCCAGATGGTAAGCCCTCCCGTATCGTAGTTATCTACA
CGACGGGGAGTCAGGCAACTATGGATGAACGAAATAGACAGATCGCTGAGATAGGTGCCTCACTGATTAAGCAT
TGGTAACTGTCAGACCAAGTTTACTCATATATACTTTAGATTGATTTAAAACTTCATTTTTAATTTAAAAGGATCTAG
GTGAAGATCCTTTTTGATAATCTCATGACCAAAATCCCTTAACGTGAGTTTTCGTTCCACTGAGCGTCAGACCCC
GTAGAAAAGATCAAAGGATCTTCTTGAGATCCTTTTTTTCTGCGCGTAATCTGCTGCTTGCAAACAAAAAAACCAC
CGCTACCAGCGGTGGTTTGTTTGCCGGATCAAGAGCTACCAACTCTTTTTCCGAAGGTAACTGGCTTCAGCAGA
GCGCAGATACCAAATACTGTTCTTCTAGTGTAGCCGTAGTTAGGCCACCACTTCAAGAACTCTGTAGCACCGCCT
ACATACCTCGCTCTGCTAATCCTGTTACCAGTGGCTGCTGCCAGTGGCGATAAGTCGTGTCTTACCGGGTTGGA
CTCAAGACGATAGTTACCGGATAAGGCGCAGCGGTCGGGCTGAACGGGGGGTTCGTGCACACAGCCCAGCTTG
GAGCGAACGACCTACACCGAACTGAGATACCTACAGCGTGAGCTATGAGAAAGCGCCACGCTTCCCGAAGGGA
GAAAGGCGGACAGGTATCCGGTAAGCGGCAGGGTCGGAACAGGAGAGCGCACGAGGGAGCTTCCAGGGGGA
AACGCCTGGTATCTTTATAGTCCTGTCGGGTTTCGCCACCTCTGACTTGAGCGTCGATTTTTGTGATGCTCGTCA
GGGGGGCGGAGCCTATGGAAAAACGCCAGCAACGCGGCCTTTTTACGGTTCCTGGCCTTTTGCTGGCCTTTTG
CTCACATGT
pAAV-CMV-sadCas9-U6gRNA(Kcnq3-sa_sgRNA3) used in in vitro qPCR experiments (SEQ ID NO: 92)
CCTGCAGGCAGCTGCGCGCTCGCTCGCTCACTGAGGCCGCCCGGGCGTCGGGCGACCTTTGGTCGCCCGGCC
TCAGTGAGCGAGCGAGCGCGCAGAGAGGGAGTGGCCAACTCCATCACTAGGGGTTCCTGCGGCCTCTAGACTC
GAGGCGTTGACATTGATTATTGACTAGTTATTAATAGTAATCAATTACGGGGTCATTAGTTCATAGCCCATATATG
GAGTTCCGCGTTACATAACTTACGGTAAATGGCCCGCCTGGCTGACCGCCCAACGACCCCCGCCCATTGACGT
CAATAATGACGTATGTTCCCATAGTAACGCCAATAGGGACTTTCCATTGACGTCAATGGGTGGAGTATTTACGGT
AAACTGCCCACTTGGCAGTACATCAAGTGTATCATATGCCAAGTACGCCCCCTATTGACGTCAATGACGGTAAAT
GGCCCGCCTGGCATTATGCCCAGTACATGACCTTATGGGACTTTCCTACTTGGCAGTACATCTACGTATTAGTCA
TCGCTATTACCATGGTGATGCGGTTTTGGCAGTACATCAATGGGCGTGGATAGCGGTTTGACTCACGGGGATTT
CCAAGTCTCCACCCCATTGACGTCAATGGGAGTTTGTTTTGGCACCAAAATCAACGGGACTTTCCAAAATGTCGT
AACAACTCCGCCCCATTGACGCAAATGGGCGGTAGGCGTGTACGGTGGGAGGTCTATATAAGCAGAGCTCTCT
GGCTAACTACCGGTGCCACCATGGCCCCAAAGAAGAAGCGGAAGGTCGGTATCCACGGAGTCCCAGCAGCCAA
GCGGAACTACATCCTGGGCCTGGCCATCGGCATCACCAGCGTGGGCTACGGCATCATCGACTACGAGACACGG
GACGTGATCGATGCCGGCGTGCGGCTGTTCAAAGAGGCCAACGTGGAAAACAACGAGGGCAGGCGGAGCAAG
AGAGGCGCCAGAAGGCTGAAGCGGCGGAGGCGGCATAGAATCCAGAGAGTGAAGAAGCTGCTGTTCGACTAC
AACCTGCTGACCGACCACAGCGAGCTGAGCGGCATCAACCCCTACGAGGCCAGAGTGAAGGGCCTGAGCCAG
AAGCTGAGCGAGGAAGAGTTCTCTGCCGCCCTGCTGCACCTGGCCAAGAGAAGAGGCGTGCACAACGTGAACG
AGGTGGAAGAGGACACCGGCAACGAGCTGTCCACCAAAGAGCAGATCAGCCGGAACAGCAAGGCCCTGGAAG
AGAAATACGTGGCCGAACTGCAGCTGGAACGGCTGAAGAAAGACGGCGAAGTGCGGGGCAGCATCAACAGATT
CAAGACCAGCGACTACGTGAAAGAAGCCAAACAGCTGCTGAAGGTGCAGAAGGCCTACCACCAGCTGGACCAG
AGCTTCATCGACACCTACATCGACCTGCTGGAAACCCGGCGGACCTACTATGAGGGACCTGGCGAGGGCAGCC
CCTTCGGCTGGAAGGACATCAAAGAATGGTACGAGATGCTGATGGGCCACTGCACCTACTTCCCCGAGGAACT
GCGGAGCGTGAAGTACGCCTACAACGCCGACCTGTACAACGCCCTGAACGACCTGAACAATCTCGTGATCACC
AGGGACGAGAACGAGAAGCTGGAATATTACGAGAAGTTCCAGATCATCGAGAACGTGTTCAAGCAGAAGAAGAA
GCCCACCCTGAAGCAGATCGCCAAAGAAATCCTCGTGAACGAAGAGGATATTAAGGGCTACAGAGTGACCAGCA
CCGGCAAGCCCGAGTTCACCAACCTGAAGGTGTACCACGACATCAAGGACATTACCGCCCGGAAAGAGATTATT
GAGAACGCCGAGCTGCTGGATCAGATTGCCAAGATCCTGACCATCTACCAGAGCAGCGAGGACATCCAGGAAG
AACTGACCAATCTGAACTCCGAGCTGACCCAGGAAGAGATCGAGCAGATCTCTAATCTGAAGGGCTATACCGGC
ACCCACAACCTGAGCCTGAAGGCCATCAACCTGATCCTGGACGAGCTGTGGCACACCAACGACAACCAGATCG
CTATCTTCAACCGGCTGAAGCTGGTGCCCAAGAAGGTGGACCTGTCCCAGCAGAAAGAGATCCCCACCACCCT
GGTGGACGACTTCATCCTGAGCCCCGTCGTGAAGAGAAGCTTCATCCAGAGCATCAAAGTGATCAACGCCATCA
TCAAGAAGTACGGCCTGCCCAACGACATCATTATCGAGCTGGCCCGCGAGAAGAACTCCAAGGACGCCCAGAA
AATGATCAACGAGATGCAGAAGCGGAACCGGCAGACCAACGAGCGGATCGAGGAAATCATCCGGACCACCGGC
AAAGAGAACGCCAAGTACCTGATCGAGAAGATCAAGCTGCACGACATGCAGGAAGGCAAGTGCCTGTACAGCC
TGGAAGCCATCCCTCTGGAAGATCTGCTGAACAACCCCTTCAACTATGAGGTGGACCACATCATCCCCAGAAGC
GTGTCCTTCGACAACAGCTTCAACAACAAGGTGCTCGTGAAGCAGGAAGAAGCCAGCAAGAAGGGCAACCGGA
CCCCATTCCAGTACCTGAGCAGCAGCGACAGCAAGATCAGCTACGAAACCTTCAAGAAGCACATCCTGAATCTG
GCCAAGGGCAAGGGCAGAATCAGCAAGACCAAGAAAGAGTATCTGCTGGAAGAACGGGACATCAACAGGTTCT
CCGTGCAGAAAGACTTCATCAACCGGAACCTGGTGGATACCAGATACGCCACCAGAGGCCTGATGAACCTGCT
GCGGAGCTACTTCAGAGTGAACAACCTGGACGTGAAAGTGAAGTCCATCAATGGCGGCTTCACCAGCTTTCTGC
GGCGGAAGTGGAAGTTTAAGAAAGAGCGGAACAAGGGGTACAAGCACCACGCCGAGGACGCCCTGATCATTGC
CAACGCCGATTTCATCTTCAAAGAGTGGAAGAAACTGGACAAGGCCAAAAAAGTGATGGAAAACCAGATGTTCG
AGGAAAAGCAGGCCGAGAGCATGCCCGAGATCGAAACCGAGCAGGAGTACAAAGAGATCTTCATCACCCCCCA
CCAGATCAAGCACATTAAGGACTTCAAGGACTACAAGTACAGCCACCGGGTGGACAAGAAGCCTAATAGAGAGC
TGATTAACGACACCCTGTACTCCACCCGGAAGGACGACAAGGGCAACACCCTGATCGTGAACAATCTGAACGGC
CTGTACGACAAGGACAATGACAAGCTGAAAAAGCTGATCAACAAGAGCCCCGAAAAGCTGCTGATGTACCACCA
CGACCCCCAGACCTACCAGAAACTGAAGCTGATTATGGAACAGTACGGCGACGAGAAGAATCCCCTGTACAAGT
ACTACGAGGAAACCGGGAACTACCTGACCAAGTACTCCAAAAAGGACAACGGCCCCGTGATCAAGAAGATTAAG
TATTACGGCAACAAACTGAACGCCCATCTGGACATCACCGACGACTACCCCAACAGCAGAAACAAGGTCGTGAA
GCTGTCCCTGAAGCCCTACAGATTCGACGTGTACCTGGACAATGGCGTGTACAAGTTCGTGACCGTGAAGAATC
TGGATGTGATCAAAAAAGAAAACTACTACGAAGTGAATAGCAAGTGCTATGAGGAAGCTAAGAAGCTGAAGAAGA
TCAGCAACCAGGCCGAGTTTATCGCCTCCTTCTACAACAACGATCTGATCAAGATCAACGGCGAGCTGTATAGA
GTGATCGGCGTGAACAACGACCTGCTGAACCGGATCGAAGTGAACATGATCGACATCACCTACCGCGAGTACCT
GGAAAACATGAACGACAAGAGGCCCCCCAGGATCATTAAGACAATCGCCTCCAAGACCCAGAGCATTAAGAAGT
ACAGCACAGACATTCTGGGCAACCTGTATGAAGTGAAATCTAAGAAGCACCCTCAGATCATCAAAAAGGGCAAAA
GGCCGGCGGCCACGAAAAAGGCCGGCCAGGCAAAAAAGAAAAAGGGATCCGGACGGGCTGACGCATTGGACG
ATTTTGATCTGGATATGCTGGGAAGTGACGCCCTCGATGATTTTGACCTTGACATGCTTGGTTCGGATGCCCTTG
ATGACTTTGACCTCGACATGCTCGGCAGTGACGCCCTTGATGATTTCGACCTGGACATGCTGATTAACTGTACAG
GCAGTGGAGAGGGCAGAGGAAGTCTGCTAACATGCGGTGACGTCGAGGAGAATCCTGGCCCAATGGCCAAGC
CTTTGTCTCAAGAAGAATCCACCCTCATTGAAAGAGCAACGGCTACAATCAACAGCATCCCCATCTCTGAAGACT
ACAGCGTCGCCAGCGCAGCTCTCTCTAGCGACGGCCGCATCTTCACTGGTGTCAATGTATATCATTTTACTGGG
GGACCTTGTGCAGAACTCGTGGTGCTGGGCACTGCTGCTGCTGCGGCAGCTGGCAACCTGACTTGTATCGTCG
CGATCGGAAATGAGAACAGGGGCATCTTGAGCCCCTGCGGACGGTGCCGACAGGTGCTTCTCGATCTGCATCC
TGGGATCAAAGCCATAGTGAAGGACAGTGATGGACAGCCGACGGCAGTTGGGATTCGTGAATTGCTGCCCTCT
GGTTATGTGTGGGAGGGCTAAGAATTCCTAGAGCTCGCTGATCAGCCTCGACTGTGCCTTCTAGTTGCCAGCCA
TCTGTTGTTTGCCCCTCCCCCGTGCCTTCCTTGACCCTGGAAGGTGCCACTCCCACTGTCCTTTCCTAATAAAAT
GAGGAAATTGCATCGCATTGTCTGAGTAGGTGTCATTCTATTCTGGGGGGTGGGGGGGGCAGGACAGCAAGG
GGGAGGATTGGGAAGAGAATAGCAGGCATGCTGGGGAGGTACCGAGGGCCTATTTCCCATGATTCCTTCATATT
TGCATATACGATACAAGGCTGTTAGAGAGATAATTGGAATTAATTTGACTGTAAACACAAAGATATTAGTACAAAA
TACGTGACGTAGAAAGTAATAATTTCTTGGGTAGTTTGCAGTTTTAAAATTATGTTTTAAAATGGACTATCATATGC
TTACCGTAACTTGAAAGTATTTCGATTTCTTGGCTTTATATATCTTGTGGAAAGGACGAAAcaccgCTACTGCCGCT
GCAGCGGGGCgTTTTAGTACTCTGGAAACAGAATCTACTAAAACAAGGCAAAATGCCGTGTTTATCTCGTCAACT
TGTTGGCGAGATTTTTGCGGCCGCAGGAACCCCTAGTGATGGAGTTGGCCACTCCCTCTCTGCGCGCTCGCTC
GCTCACTGAGGCCGGGCGACCAAAGGTCGCCCGACGCCCGGGCTTTGCCCGGGCGGCCTCAGTGAGCGAGC
GAGCGCGCAGCTGCCTGCAGGGGCGCCTGATGCGGTATTTTCTCCTTACGCATCTGTGCGGTATTTCACACCG
CATACGTCAAAGCAACCATAGTACGCGCCCTGTAGCGGCGCATTAAGCGCGGCGGGTGTGGTGGTTACGCGCA
GCGTGACCGCTACACTTGCCAGCGCCTTAGCGCCCGCTCCTTTCGCTTTCTTCCCTTCCTTTCTCGCCACGTTC
GCCGGCTTTCCCCGTCAAGCTCTAAATCGGGGGCTCCCTTTAGGGTTCCGATTTAGTGCTTTACGGCACCTCGA
CCCCAAAAAACTTGATTTGGGTGATGGTTCACGTAGTGGGCCATCGCCCTGATAGACGGTTTTTCGCCCTTTGAC
GTTGGAGTCCACGTTCTTTAATAGTGGACTCTTGTTCCAAACTGGAACAACACTCAACTCTATCTCGGGCTATTCT
TTTGATTTATAAGGGATTTTGCCGATTTCGGTCTATTGGTTAAAAAATGAGCTGATTTAACAAAAATTTAACGCGAA
TTTTAACAAAATATTAACGTTTACAATTTTATGGTGCACTCTCAGTACAATCTGCTCTGATGCCGCATAGTTAAGCC
AGCCCCGACACCCGCCAACACCCGCTGACGCGCCCTGACGGGCTTGTCTGCTCCCGGCATCCGCTTACAGACA
AGCTGTGACCGTCTCCGGGAGCTGCATGTGTCAGAGGTTTTCACCGTCATCACCGAAACGCGCGAGACGAAAG
GGCCTCGTGATACGCCTATTTTTATAGGTTAATGTCATGATAATAATGGTTTCTTAGACGTCAGGTGGCACTTTTC
GGGGAAATGTGCGCGGAACCCCTATTTGTTTATTTTTCTAAATACATTCAAATATGTATCCGCTCATGAGACAATA
ACCCTGATAAATGCTTCAATAATATTGAAAAAGGAAGAGTATGAGTATTCAACATTTCCGTGTCGCCCTTATTCCC
TTTTTTGCGGCATTTTGCCTTCCTGTTTTTGCTCACCCAGAAACGCTGGTGAAAGTAAAAGATGCTGAAGATCAGT
TGGGTGCACGAGTGGGTTACATCGAACTGGATCTCAACAGCGGTAAGATCCTTGAGAGTTTTCGCCCCGAAGAA
CGTTTTCCAATGATGAGCACTTTTAAAGTTCTGCTATGTGGCGCGGTATTATCCCGTATTGACGCCGGGCAAGAG
CAACTCGGTCGCCGCATACACTATTCTCAGAATGACTTGGTTGAGTACTCACCAGTCACAGAAAAGCATCTTACG
GATGGCATGACAGTAAGAGAATTATGCAGTGCTGCCATAACCATGAGTGATAACACTGCGGCCAACTTACTTCTG
ACAACGATCGGAGGACCGAAGGAGCTAACCGCTTTTTTGCACAACATGGGGGATCATGTAACTCGCCTTGATCG
TTGGGAACCGGAGCTGAATGAAGCCATACCAAACGACGAGCGTGACACCACGATGCCTGTAGCAATGGCAACA
ACGTTGCGCAAACTATTAACTGGCGAACTACTTACTCTAGCTTCCCGGCAACAATTAATAGACTGGATGGAGGCG
GATAAAGTTGCAGGACCACTTCTGCGCTCGGCCCTTCCGGCTGGCTGGTTTATTGCTGATAAATCTGGAGCCGG
TGAGCGTGGAAGCCGCGGTATCATTGCAGCACTGGGGCCAGATGGTAAGCCCTCCCGTATCGTAGTTATCTACA
CGACGGGGAGTCAGGCAACTATGGATGAACGAAATAGACAGATCGCTGAGATAGGTGCCTCACTGATTAAGCAT
TGGTAACTGTCAGACCAAGTTTACTCATATATACTTTAGATTGATTTAAAACTTCATTTTTAATTTAAAAGGATCTAG
GTGAAGATCCTTTTTGATAATCTCATGACCAAAATCCCTTAACGTGAGTTTTCGTTCCACTGAGCGTCAGACCCC
GTAGAAAAGATCAAAGGATCTTCTTGAGATCCTTTTTTTCTGCGCGTAATCTGCTGCTTGCAAACAAAAAAACCAC
CGCTACCAGCGGTGGTTTGTTTGCCGGATCAAGAGCTACCAACTCTTTTTCCGAAGGTAACTGGCTTCAGCAGA
GCGCAGATACCAAATACTGTTCTTCTAGTGTAGCCGTAGTTAGGCCACCACTTCAAGAACTCTGTAGCACCGCCT
ACATACCTCGCTCTGCTAATCCTGTTACCAGTGGCTGCTGCCAGTGGCGATAAGTCGTGTCTTACCGGGTTGGA
CTCAAGACGATAGTTACCGGATAAGGCGCAGCGGTCGGGCTGAACGGGGGGTTCGTGCACACAGCCCAGCTTG
GAGCGAACGACCTACACCGAACTGAGATACCTACAGCGTGAGCTATGAGAAAGCGCCACGCTTCCCGAAGGGA
GAAAGGCGGACAGGTATCCGGTAAGCGGCAGGGTCGGAACAGGAGAGCGCACGAGGGAGCTTCCAGGGGGA
AACGCCTGGTATCTTTATAGTCCTGTCGGGTTTCGCCACCTCTGACTTGAGCGTCGATTTTTGTGATGCTCGTCA
GGGGGGCGGAGCCTATGGAAAAACGCCAGCAACGCGGCCTTTTTACGGTTCCTGGCCTTTTGCTGGCCTTTTG
CTCACATGT
1.7 GABRA1
Nucleotide sequence of sasgRNA for mouse GABRA1; sgRNA1 (SEQ ID NO: 93)
AATCTCCAGTGCAGGAGCACG
Nucleotide sequence of sasgRNA for mouse GABRA1; sgRNA2 (SEQ ID NO: 94)
ATTGGATATTGGGAAGCAAAT
Nucleotide sequence of sasgRNA for mouse GABRA1; sgRNA3 (SEQ ID NO: 95)
TGTATAGCTGCAGATTGGATA
pAAV-CMV-sadCas9-U6gRNA(Gabra1-sa_sgRNA1) used in in vitro qPCR experiments (SEQ ID NO: 96)
CCTGCAGGCAGCTGCGCGCTCGCTCGCTCACTGAGGCCGCCCGGGCGTCGGGCGACCTTTGGTCGCCCGGCC
TCAGTGAGCGAGCGAGCGCGCAGAGAGGGAGTGGCCAACTCCATCACTAGGGGTTCCTGCGGCCTCTAGACTC
GAGGCGTTGACATTGATTATTGACTAGTTATTAATAGTAATCAATTACGGGGTCATTAGTTCATAGCCCATATATG
GAGTTCCGCGTTACATAACTTACGGTAAATGGCCCGCCTGGCTGACCGCCCAACGACCCCCGCCCATTGACGT
CAATAATGACGTATGTTCCCATAGTAACGCCAATAGGGACTTTCCATTGACGTCAATGGGTGGAGTATTTACGGT
AAACTGCCCACTTGGCAGTACATCAAGTGTATCATATGCCAAGTACGCCCCCTATTGACGTCAATGACGGTAAAT
GGCCCGCCTGGCATTATGCCCAGTACATGACCTTATGGGACTTTCCTACTTGGCAGTACATCTACGTATTAGTCA
TCGCTATTACCATGGTGATGCGGTTTTGGCAGTACATCAATGGGCGTGGATAGCGGTTTGACTCACGGGGATTT
CCAAGTCTCCACCCCATTGACGTCAATGGGAGTTTGTTTTGGCACCAAAATCAACGGGACTTTCCAAAATGTCGT
AACAACTCCGCCCCATTGACGCAAATGGGCGGTAGGCGTGTACGGTGGGAGGTCTATATAAGCAGAGCTCTCT
GGCTAACTACCGGTGCCACCATGGCCCCAAAGAAGAAGCGGAAGGTCGGTATCCACGGAGTCCCAGCAGCCAA
GCGGAACTACATCCTGGGCCTGGCCATCGGCATCACCAGCGTGGGCTACGGCATCATCGACTACGAGACACGG
GACGTGATCGATGCCGGCGTGCGGCTGTTCAAAGAGGCCAACGTGGAAAACAACGAGGGCAGGCGGAGCAAG
AGAGGCGCCAGAAGGCTGAAGCGGCGGAGGCGGCATAGAATCCAGAGAGTGAAGAAGCTGCTGTTCGACTAC
AACCTGCTGACCGACCACAGCGAGCTGAGCGGCATCAACCCCTACGAGGCCAGAGTGAAGGGCCTGAGCCAG
AAGCTGAGCGAGGAAGAGTTCTCTGCCGCCCTGCTGCACCTGGCCAAGAGAAGAGGCGTGCACAACGTGAACG
AGGTGGAAGAGGACACCGGCAACGAGCTGTCCACCAAAGAGCAGATCAGCCGGAACAGCAAGGCCCTGGAAG
AGAAATACGTGGCCGAACTGCAGCTGGAACGGCTGAAGAAAGACGGCGAAGTGCGGGGCAGCATCAACAGATT
CAAGACCAGCGACTACGTGAAAGAAGCCAAACAGCTGCTGAAGGTGCAGAAGGCCTACCACCAGCTGGACCAG
AGCTTCATCGACACCTACATCGACCTGCTGGAAACCCGGCGGACCTACTATGAGGGACCTGGCGAGGGCAGCC
CCTTCGGCTGGAAGGACATCAAAGAATGGTACGAGATGCTGATGGGCCACTGCACCTACTTCCCCGAGGAACT
GCGGAGCGTGAAGTACGCCTACAACGCCGACCTGTACAACGCCCTGAACGACCTGAACAATCTCGTGATCACC
AGGGACGAGAACGAGAAGCTGGAATATTACGAGAAGTTCCAGATCATCGAGAACGTGTTCAAGCAGAAGAAGAA
GCCCACCCTGAAGCAGATCGCCAAAGAAATCCTCGTGAACGAAGAGGATATTAAGGGCTACAGAGTGACCAGCA
CCGGCAAGCCCGAGTTCACCAACCTGAAGGTGTACCACGACATCAAGGACATTACCGCCCGGAAAGAGATTATT
GAGAACGCCGAGCTGCTGGATCAGATTGCCAAGATCCTGACCATCTACCAGAGCAGCGAGGACATCCAGGAAG
AACTGACCAATCTGAACTCCGAGCTGACCCAGGAAGAGATCGAGCAGATCTCTAATCTGAAGGGCTATACCGGC
ACCCACAACCTGAGCCTGAAGGCCATCAACCTGATCCTGGACGAGCTGTGGCACACCAACGACAACCAGATCG
CTATCTTCAACCGGCTGAAGCTGGTGCCCAAGAAGGTGGACCTGTCCCAGCAGAAAGAGATCCCCACCACCCT
GGTGGACGACTTCATCCTGAGCCCCGTCGTGAAGAGAAGCTTCATCCAGAGCATCAAAGTGATCAACGCCATCA
TCAAGAAGTACGGCCTGCCCAACGACATCATTATCGAGCTGGCCCGCGAGAAGAACTCCAAGGACGCCCAGAA
AATGATCAACGAGATGCAGAAGCGGAACCGGCAGACCAACGAGCGGATCGAGGAAATCATCCGGACCACCGGC
AAAGAGAACGCCAAGTACCTGATCGAGAAGATCAAGCTGCACGACATGCAGGAAGGCAAGTGCCTGTACAGCC
TGGAAGCCATCCCTCTGGAAGATCTGCTGAACAACCCCTTCAACTATGAGGTGGACCACATCATCCCCAGAAGC
GTGTCCTTCGACAACAGCTTCAACAACAAGGTGCTCGTGAAGCAGGAAGAAGCCAGCAAGAAGGGCAACCGGA
CCCCATTCCAGTACCTGAGCAGCAGCGACAGCAAGATCAGCTACGAAACCTTCAAGAAGCACATCCTGAATCTG
GCCAAGGGCAAGGGCAGAATCAGCAAGACCAAGAAAGAGTATCTGCTGGAAGAACGGGACATCAACAGGTTCT
CCGTGCAGAAAGACTTCATCAACCGGAACCTGGTGGATACCAGATACGCCACCAGAGGCCTGATGAACCTGCT
GCGGAGCTACTTCAGAGTGAACAACCTGGACGTGAAAGTGAAGTCCATCAATGGCGGCTTCACCAGCTTTCTGC
GGCGGAAGTGGAAGTTTAAGAAAGAGCGGAACAAGGGGTACAAGCACCACGCCGAGGACGCCCTGATCATTGC
CAACGCCGATTTCATCTTCAAAGAGTGGAAGAAACTGGACAAGGCCAAAAAAGTGATGGAAAACCAGATGTTCG
AGGAAAAGCAGGCCGAGAGCATGCCCGAGATCGAAACCGAGCAGGAGTACAAAGAGATCTTCATCACCCCCCA
CCAGATCAAGCACATTAAGGACTTCAAGGACTACAAGTACAGCCACCGGGTGGACAAGAAGCCTAATAGAGAGC
TGATTAACGACACCCTGTACTCCACCCGGAAGGACGACAAGGGCAACACCCTGATCGTGAACAATCTGAACGGC
CTGTACGACAAGGACAATGACAAGCTGAAAAAGCTGATCAACAAGAGCCCCGAAAAGCTGCTGATGTACCACCA
CGACCCCCAGACCTACCAGAAACTGAAGCTGATTATGGAACAGTACGGCGACGAGAAGAATCCCCTGTACAAGT
ACTACGAGGAAACCGGGAACTACCTGACCAAGTACTCCAAAAAGGACAACGGCCCCGTGATCAAGAAGATTAAG
TATTACGGCAACAAACTGAACGCCCATCTGGACATCACCGACGACTACCCCAACAGCAGAAACAAGGTCGTGAA
GCTGTCCCTGAAGCCCTACAGATTCGACGTGTACCTGGACAATGGCGTGTACAAGTTCGTGACCGTGAAGAATC
TGGATGTGATCAAAAAAGAAAACTACTACGAAGTGAATAGCAAGTGCTATGAGGAAGCTAAGAAGCTGAAGAAGA
TCAGCAACCAGGCCGAGTTTATCGCCTCCTTCTACAACAACGATCTGATCAAGATCAACGGCGAGCTGTATAGA
GTGATCGGCGTGAACAACGACCTGCTGAACCGGATCGAAGTGAACATGATCGACATCACCTACCGCGAGTACCT
GGAAAACATGAACGACAAGAGGCCCCCCAGGATCATTAAGACAATCGCCTCCAAGACCCAGAGCATTAAGAAGT
ACAGCACAGACATTCTGGGCAACCTGTATGAAGTGAAATCTAAGAAGCACCCTCAGATCATCAAAAAGGGCAAAA
GGCCGGCGGCCACGAAAAAGGCCGGCCAGGCAAAAAAGAAAAAGGGATCCGGACGGGCTGACGCATTGGACG
ATTTTGATCTGGATATGCTGGGAAGTGACGCCCTCGATGATTTTGACCTTGACATGCTTGGTTCGGATGCCCTTG
ATGACTTTGACCTCGACATGCTCGGCAGTGACGCCCTTGATGATTTCGACCTGGACATGCTGATTAACTGTACAG
GCAGTGGAGAGGGCAGAGGAAGTCTGCTAACATGCGGTGACGTCGAGGAGAATCCTGGCCCAATGGCCAAGC
CTTTGTCTCAAGAAGAATCCACCCTCATTGAAAGAGCAACGGCTACAATCAACAGCATCCCCATCTCTGAAGACT
ACAGCGTCGCCAGCGCAGCTCTCTCTAGCGACGGCCGCATCTTCACTGGTGTCAATGTATATCATTTTACTGGG
GGACCTTGTGCAGAACTCGTGGTGCTGGGCACTGCTGCTGCTGCGGCAGCTGGCAACCTGACTTGTATCGTCG
CGATCGGAAATGAGAACAGGGGCATCTTGAGCCCCTGCGGACGGTGCCGACAGGTGCTTCTCGATCTGCATCC
TGGGATCAAAGCCATAGTGAAGGACAGTGATGGACAGCCGACGGCAGTTGGGATTCGTGAATTGCTGCCCTCT
GGTTATGTGTGGGAGGGCTAAGAATTCCTAGAGCTCGCTGATCAGCCTCGACTGTGCCTTCTAGTTGCCAGCCA
TCTGTTGTTTGCCCCTCCCCCGTGCCTTCCTTGACCCTGGAAGGTGCCACTCCCACTGTCCTTTCCTAATAAAAT
GAGGAAATTGCATCGCATTGTCTGAGTAGGTGTCATTCTATTCTGGGGGGTGGGGTGGGGCAGGACAGCAAGG
GGGAGGATTGGGAAGAGAATAGCAGGCATGCTGGGGAGGTACCGAGGGCCTATTTCCCATGATTCCTTCATATT
TGCATATACGATACAAGGCTGTTAGAGAGATAATTGGAATTAATTTGACTGTAAACACAAAGATATTAGTACAAAA
TACGTGACGTAGAAAGTAATAATTTCTTGGGTAGTTTGCAGTTTTAAAATTATGTTTTAAAATGGACTATCATATGC
TTACCGTAACTTGAAAGTATTTCGATTTCTTGGCTTTATATATCTTGTGGAAAGGACGAAAcaccgAATCTCCAGTG
CAGGAGCACGgTTTTAGTACTCTGGAAACAGAATCTACTAAAACAAGGCAAAATGCCGTGTTTATCTCGTCAACTT
GTTGGCGAGATTTTTGCGGCCGCAGGAACCCCTAGTGATGGAGTTGGCCACTCCCTCTCTGCGCGCTCGCTCG
CTCACTGAGGCCGGGCGACCAAAGGTCGCCCGACGCCCGGGCTTTGCCCGGGCGGCCTCAGTGAGCGAGCG
AGCGCGCAGCTGCCTGCAGGGGCGCCTGATGCGGTATTTTCTCCTTACGCATCTGTGCGGTATTTCACACCGCA
TACGTCAAAGCAACCATAGTACGCGCCCTGTAGCGGCGCATTAAGCGCGGCGGGTGTGGTGGTTACGCGCAGC
GTGACCGCTACACTTGCCAGCGCCTTAGCGCCCGCTCCTTTCGCTTTCTTCCCTTCCTTTCTCGCCACGTTCGC
CGGCTTTCCCCGTCAAGCTCTAAATCGGGGGCTCCCTTTAGGGTTCCGATTTAGTGCTTTACGGCACCTCGACC
CCAAAAAACTTGATTTGGGTGATGGTTCACGTAGTGGGCCATCGCCCTGATAGACGGTTTTTCGCCCTTTGACGT
TGGAGTCCACGTTCTTTAATAGTGGACTCTTGTTCCAAACTGGAACAACACTCAACTCTATCTCGGGCTATTCTTT
TGATTTATAAGGGATTTTGCCGATTTCGGTCTATTGGTTAAAAAATGAGCTGATTTAACAAAAATTTAACGCGAATT
TTAACAAAATATTAACGTTTACAATTTTATGGTGCACTCTCAGTACAATCTGCTCTGATGCCGCATAGTTAAGCCA
GCCCCGACACCCGCCAACACCCGCTGACGCGCCCTGACGGGCTTGTCTGCTCCCGGCATCCGCTTACAGACAA
GCTGTGACCGTCTCCGGGAGCTGCATGTGTCAGAGGTTTTCACCGTCATCACCGAAACGCGCGAGACGAAAGG
GCCTCGTGATACGCCTATTTTTATAGGTTAATGTCATGATAATAATGGTTTCTTAGACGTCAGGTGGCACTTTTCG
GGGAAATGTGCGCGGAACCCCTATTTGTTTATTTTTCTAAATACATTCAAATATGTATCCGCTCATGAGACAATAA
CCCTGATAAATGCTTCAATAATATTGAAAAAGGAAGAGTATGAGTATTCAACATTTCCGTGTCGCCCTTATTCCCT
TTTTTGCGGCATTTTGCCTTCCTGTTTTTGCTCACCCAGAAACGCTGGTGAAAGTAAAAGATGCTGAAGATCAGTT
GGGTGCACGAGTGGGTTACATCGAACTGGATCTCAACAGCGGTAAGATCCTTGAGAGTTTTCGCCCCGAAGAAC
GTTTTCCAATGATGAGCACTTTTAAAGTTCTGCTATGTGGCGCGGTATTATCCCGTATTGACGCCGGGCAAGAGC
AACTCGGTCGCCGCATACACTATTCTCAGAATGACTTGGTTGAGTACTCACCAGTCACAGAAAAGCATCTTACGG
ATGGCATGACAGTAAGAGAATTATGCAGTGCTGCCATAACCATGAGTGATAACACTGCGGCCAACTTACTTCTGA
CAACGATCGGAGGACCGAAGGAGCTAACCGCTTTTTTGCACAACATGGGGGATCATGTAACTCGCCTTGATCGT
TGGGAACCGGAGCTGAATGAAGCCATACCAAACGACGAGCGTGACACCACGATGCCTGTAGCAATGGCAACAA
CGTTGCGCAAACTATTAACTGGCGAACTACTTACTCTAGCTTCCCGGCAACAATTAATAGACTGGATGGAGGCG
GATAAAGTTGCAGGACCACTTCTGCGCTCGGCCCTTCCGGCTGGCTGGTTTATTGCTGATAAATCTGGAGCCGG
TGAGCGTGGAAGCCGCGGTATCATTGCAGCACTGGGGCCAGATGGTAAGCCCTCCCGTATCGTAGTTATCTACA
CGACGGGGAGTCAGGCAACTATGGATGAACGAAATAGACAGATCGCTGAGATAGGTGCCTCACTGATTAAGCAT
TGGTAACTGTCAGACCAAGTTTACTCATATATACTTTAGATTGATTTAAAACTTCATTTTTAATTTAAAAGGATCTAG
GTGAAGATCCTTTTTGATAATCTCATGACCAAAATCCCTTAACGTGAGTTTTCGTTCCACTGAGCGTCAGACCCC
GTAGAAAAGATCAAAGGATCTTCTTGAGATCCTTTTTTTCTGCGCGTAATCTGCTGCTTGCAAACAAAAAAACCAC
CGCTACCAGCGGTGGTTTGTTTGCCGGATCAAGAGCTACCAACTCTTTTTCCGAAGGTAACTGGCTTCAGCAGA
GCGCAGATACCAAATACTGTTCTTCTAGTGTAGCCGTAGTTAGGCCACCACTTCAAGAACTCTGTAGCACCGCCT
ACATACCTCGCTCTGCTAATCCTGTTACCAGTGGCTGCTGCCAGTGGCGATAAGTCGTGTCTTACCGGGTTGGA
CTCAAGACGATAGTTACCGGATAAGGCGCAGCGGTCGGGCTGAACGGGGGGTTCGTGCACACAGCCCAGCTTG
GAGCGAACGACCTACACCGAACTGAGATACCTACAGCGTGAGCTATGAGAAAGCGCCACGCTTCCCGAAGGGA
GAAAGGCGGACAGGTATCCGGTAAGCGGCAGGGTCGGAACAGGAGAGCGCACGAGGGAGCTTCCAGGGGGA
AACGCCTGGTATCTTTATAGTCCTGTCGGGTTTCGCCACCTCTGACTTGAGCGTCGATTTTTGTGATGCTCGTCA
GGGGGGCGGAGCCTATGGAAAAACGCCAGCAACGCGGCCTTTTTACGGTTCCTGGCCTTTTGCTGGCCTTTTG
CTCACATGT
pAAV-CMV-sadCas9-U6gRNA(Gabra1-sa_sgRNA2) used in in vitro qPCR experiments (SEQ ID NO: 97)
CCTGCAGGCAGCTGCGCGCTCGCTCGCTCACTGAGGCCGCCCGGGCGTCGGGCGACCTTTGGTCGCCCGGCC
TCAGTGAGCGAGCGAGCGCGCAGAGAGGGAGTGGCCAACTCCATCACTAGGGGTTCCTGCGGCCTCTAGACTC
GAGGCGTTGACATTGATTATTGACTAGTTATTAATAGTAATCAATTACGGGGTCATTAGTTCATAGCCCATATATG
GAGTTCCGCGTTACATAACTTACGGTAAATGGCCCGCCTGGCTGACCGCCCAACGACCCCCGCCCATTGACGT
CAATAATGACGTATGTTCCCATAGTAACGCCAATAGGGACTTTCCATTGACGTCAATGGGTGGAGTATTTACGGT
AAACTGCCCACTTGGCAGTACATCAAGTGTATCATATGCCAAGTACGCCCCCTATTGACGTCAATGACGGTAAAT
GGCCCGCCTGGCATTATGCCCAGTACATGACCTTATGGGACTTTCCTACTTGGCAGTACATCTACGTATTAGTCA
TCGCTATTACCATGGTGATGCGGTTTTGGCAGTACATCAATGGGCGTGGATAGCGGTTTGACTCACGGGGATTT
CCAAGTCTCCACCCCATTGACGTCAATGGGAGTTTGTTTTGGCACCAAAATCAACGGGACTTTCCAAAATGTCGT
AACAACTCCGCCCCATTGACGCAAATGGGCGGTAGGCGTGTACGGTGGGAGGTCTATATAAGCAGAGCTCTCT
GGCTAACTACCGGTGCCACCATGGCCCCAAAGAAGAAGCGGAAGGTCGGTATCCACGGAGTCCCAGCAGCCAA
GCGGAACTACATCCTGGGCCTGGCCATCGGCATCACCAGCGTGGGCTACGGCATCATCGACTACGAGACACGG
GACGTGATCGATGCCGGCGTGCGGCTGTTCAAAGAGGCCAACGTGGAAAACAACGAGGGCAGGCGGAGCAAG
AGAGGCGCCAGAAGGCTGAAGCGGCGGAGGCGGCATAGAATCCAGAGAGTGAAGAAGCTGCTGTTCGACTAC
AACCTGCTGACCGACCACAGCGAGCTGAGCGGCATCAACCCCTACGAGGCCAGAGTGAAGGGCCTGAGCCAG
AAGCTGAGCGAGGAAGAGTTCTCTGCCGCCCTGCTGCACCTGGCCAAGAGAAGAGGCGTGCACAACGTGAACG
AGGTGGAAGAGGACACCGGCAACGAGCTGTCCACCAAAGAGCAGATCAGCCGGAACAGCAAGGCCCTGGAAG
AGAAATACGTGGCCGAACTGCAGCTGGAACGGCTGAAGAAAGACGGCGAAGTGCGGGGCAGCATCAACAGATT
CAAGACCAGCGACTACGTGAAAGAAGCCAAACAGCTGCTGAAGGTGCAGAAGGCCTACCACCAGCTGGACCAG
AGCTTCATCGACACCTACATCGACCTGCTGGAAACCCGGCGGACCTACTATGAGGGACCTGGCGAGGGCAGCC
CCTTCGGCTGGAAGGACATCAAAGAATGGTACGAGATGCTGATGGGCCACTGCACCTACTTCCCCGAGGAACT
GCGGAGCGTGAAGTACGCCTACAACGCCGACCTGTACAACGCCCTGAACGACCTGAACAATCTCGTGATCACC
AGGGACGAGAACGAGAAGCTGGAATATTACGAGAAGTTCCAGATCATCGAGAACGTGTTCAAGCAGAAGAAGAA
GCCCACCCTGAAGCAGATCGCCAAAGAAATCCTCGTGAACGAAGAGGATATTAAGGGCTACAGAGTGACCAGCA
CCGGCAAGCCCGAGTTCACCAACCTGAAGGTGTACCACGACATCAAGGACATTACCGCCCGGAAAGAGATTATT
GAGAACGCCGAGCTGCTGGATCAGATTGCCAAGATCCTGACCATCTACCAGAGCAGCGAGGACATCCAGGAAG
AACTGACCAATCTGAACTCCGAGCTGACCCAGGAAGAGATCGAGCAGATCTCTAATCTGAAGGGCTATACCGGC
ACCCACAACCTGAGCCTGAAGGCCATCAACCTGATCCTGGACGAGCTGTGGCACACCAACGACAACCAGATCG
CTATCTTCAACCGGCTGAAGCTGGTGCCCAAGAAGGTGGACCTGTCCCAGCAGAAAGAGATCCCCACCACCCT
GGTGGACGACTTCATCCTGAGCCCCGTCGTGAAGAGAAGCTTCATCCAGAGCATCAAAGTGATCAACGCCATCA
TCAAGAAGTACGGCCTGCCCAACGACATCATTATCGAGCTGGCCCGCGAGAAGAACTCCAAGGACGCCCAGAA
AATGATCAACGAGATGCAGAAGCGGAACCGGCAGACCAACGAGCGGATCGAGGAAATCATCCGGACCACCGGC
AAAGAGAACGCCAAGTACCTGATCGAGAAGATCAAGCTGCACGACATGCAGGAAGGCAAGTGCCTGTACAGCC
TGGAAGCCATCCCTCTGGAAGATCTGCTGAACAACCCCTTCAACTATGAGGTGGACCACATCATCCCCAGAAGC
GTGTCCTTCGACAACAGCTTCAACAACAAGGTGCTCGTGAAGCAGGAAGAAGCCAGCAAGAAGGGCAACCGGA
CCCCATTCCAGTACCTGAGCAGCAGCGACAGCAAGATCAGCTACGAAACCTTCAAGAAGCACATCCTGAATCTG
GCCAAGGGCAAGGGCAGAATCAGCAAGACCAAGAAAGAGTATCTGCTGGAAGAACGGGACATCAACAGGTTCT
CCGTGCAGAAAGACTTCATCAACCGGAACCTGGTGGATACCAGATACGCCACCAGAGGCCTGATGAACCTGCT
GCGGAGCTACTTCAGAGTGAACAACCTGGACGTGAAAGTGAAGTCCATCAATGGCGGCTTCACCAGCTTTCTGC
GGCGGAAGTGGAAGTTTAAGAAAGAGCGGAACAAGGGGTACAAGCACCACGCCGAGGACGCCCTGATCATTGC
CAACGCCGATTTCATCTTCAAAGAGTGGAAGAAACTGGACAAGGCCAAAAAAGTGATGGAAAACCAGATGTTCG
AGGAAAAGCAGGCCGAGAGCATGCCCGAGATCGAAACCGAGCAGGAGTACAAAGAGATCTTCATCACCCCCCA
CCAGATCAAGCACATTAAGGACTTCAAGGACTACAAGTACAGCCACCGGGTGGACAAGAAGCCTAATAGAGAGC
TGATTAACGACACCCTGTACTCCACCCGGAAGGACGACAAGGGCAACACCCTGATCGTGAACAATCTGAACGGC
CTGTACGACAAGGACAATGACAAGCTGAAAAAGCTGATCAACAAGAGCCCCGAAAAGCTGCTGATGTACCACCA
CGACCCCCAGACCTACCAGAAACTGAAGCTGATTATGGAACAGTACGGCGACGAGAAGAATCCCCTGTACAAGT
ACTACGAGGAAACCGGGAACTACCTGACCAAGTACTCCAAAAAGGACAACGGCCCCGTGATCAAGAAGATTAAG
TATTACGGCAACAAACTGAACGCCCATCTGGACATCACCGACGACTACCCCAACAGCAGAAACAAGGTCGTGAA
GCTGTCCCTGAAGCCCTACAGATTCGACGTGTACCTGGACAATGGCGTGTACAAGTTCGTGACCGTGAAGAATC
TGGATGTGATCAAAAAAGAAAACTACTACGAAGTGAATAGCAAGTGCTATGAGGAAGCTAAGAAGCTGAAGAAGA
TCAGCAACCAGGCCGAGTTTATCGCCTCCTTCTACAACAACGATCTGATCAAGATCAACGGCGAGCTGTATAGA
GTGATCGGCGTGAACAACGACCTGCTGAACCGGATCGAAGTGAACATGATCGACATCACCTACCGCGAGTACCT
GGAAAACATGAACGACAAGAGGCCCCCCAGGATCATTAAGACAATCGCCTCCAAGACCCAGAGCATTAAGAAGT
ACAGCACAGACATTCTGGGCAACCTGTATGAAGTGAAATCTAAGAAGCACCCTCAGATCATCAAAAAGGGCAAAA
GGCCGGCGGCCACGAAAAAGGCCGGCCAGGCAAAAAAGAAAAAGGGATCCGGACGGGCTGACGCATTGGACG
ATTTTGATCTGGATATGCTGGGAAGTGACGCCCTCGATGATTTTGACCTTGACATGCTTGGTTCGGATGCCCTTG
ATGACTTTGACCTCGACATGCTCGGCAGTGACGCCCTTGATGATTTCGACCTGGACATGCTGATTAACTGTACAG
GCAGTGGAGAGGGCAGAGGAAGTCTGCTAACATGCGGTGACGTCGAGGAGAATCCTGGCCCAATGGCCAAGC
CTTTGTCTCAAGAAGAATCCACCCTCATTGAAAGAGCAACGGCTACAATCAACAGCATCCCCATCTCTGAAGACT
ACAGCGTCGCCAGCGCAGCTCTCTCTAGCGACGGCCGCATCTTCACTGGTGTCAATGTATATCATTTTACTGGG
GGACCTTGTGCAGAACTCGTGGTGCTGGGCACTGCTGCTGCTGCGGCAGCTGGCAACCTGACTTGTATCGTCG
CGATCGGAAATGAGAACAGGGGCATCTTGAGCCCCTGCGGACGGTGCCGACAGGTGCTTCTCGATCTGCATCC
TGGGATCAAAGCCATAGTGAAGGACAGTGATGGACAGCCGACGGCAGTTGGGATTCGTGAATTGCTGCCCTCT
GGTTATGTGTGGGAGGGCTAAGAATTCCTAGAGCTCGCTGATCAGCCTCGACTGTGCCTTCTAGTTGCCAGCCA
TCTGTTGTTTGCCCCTCCCCCGTGCCTTCCTTGACCCTGGAAGGTGCCACTCCCACTGTCCTTTCCTAATAAAAT
GAGGAAATTGCATCGCATTGTCTGAGTAGGTGTCATTCTATTCTGGGGGGTGGGGTGGGGCAGGACAGCAAGG
GGGAGGATTGGGAAGAGAATAGCAGGCATGCTGGGGAGGTACCGAGGGCCTATTTCCCATGATTCCTTCATATT
TGCATATACGATACAAGGCTGTTAGAGAGATAATTGGAATTAATTTGACTGTAAACACAAAGATATTAGTACAAAA
TACGTGACGTAGAAAGTAATAATTTCTTGGGTAGTTTGCAGTTTTAAAATTATGTTTTAAAATGGACTATCATATGC
TTACCGTAACTTGAAAGTATTTCGATTTCTTGGCTTTATATATCTTGTGGAAAGGACGAAAcaccgATTGGATATTGG
GAAGCAAATgTTTTAGTACTCTGGAAACAGAATCTACTAAAACAAGGCAAAATGCCGTGTTTATCTCGTCAACTTG
TTGGCGAGATTTTTGCGGCCGCAGGAACCCCTAGTGATGGAGTTGGCCACTCCCTCTCTGCGCGCTCGCTCGC
TCACTGAGGCCGGGCGACCAAAGGTCGCCCGACGCCCGGGCTTTGCCCGGGCGGCCTCAGTGAGCGAGCGA
GCGCGCAGCTGCCTGCAGGGGCGCCTGATGCGGTATTTTCTCCTTACGCATCTGTGCGGTATTTCACACCGCAT
ACGTCAAAGCAACCATAGTACGCGCCCTGTAGCGGCGCATTAAGCGCGGCGGGTGTGGTGGTTACGCGCAGC
GTGACCGCTACACTTGCCAGCGCCTTAGCGCCCGCTCCTTTCGCTTTCTTCCCTTCCTTTCTCGCCACGTTCGC
CGGCTTTCCCCGTCAAGCTCTAAATCGGGGGCTCCCTTTAGGGTTCCGATTTAGTGCTTTACGGCACCTCGACC
CCAAAAAACTTGATTTGGGTGATGGTTCACGTAGTGGGCCATCGCCCTGATAGACGGTTTTTCGCCCTTTGACGT
TGGAGTCCACGTTCTTTAATAGTGGACTCTTGTTCCAAACTGGAACAACACTCAACTCTATCTCGGGCTATTCTTT
TGATTTATAAGGGATTTTGCCGATTTCGGTCTATTGGTTAAAAAATGAGCTGATTTAACAAAAATTTAACGCGAATT
TTAACAAAATATTAACGTTTACAATTTTATGGTGCACTCTCAGTACAATCTGCTCTGATGCCGCATAGTTAAGCCA
GCCCCGACACCCGCCAACACCCGCTGACGCGCCCTGACGGGCTTGTCTGCTCCCGGCATCCGCTTACAGACAA
GCTGTGACCGTCTCCGGGAGCTGCATGTGTCAGAGGTTTTCACCGTCATCACCGAAACGCGCGAGACGAAAGG
GCCTCGTGATACGCCTATTTTTATAGGTTAATGTCATGATAATAATGGTTTCTTAGACGTCAGGTGGCACTTTTCG
GGGAAATGTGCGCGGAACCCCTATTTGTTTATTTTTCTAAATACATTCAAATATGTATCCGCTCATGAGACAATAA
CCCTGATAAATGCTTCAATAATATTGAAAAAGGAAGAGTATGAGTATTCAACATTTCCGTGTCGCCCTTATTCCCT
TTTTTGCGGCATTTTGCCTTCCTGTTTTTGCTCACCCAGAAACGCTGGTGAAAGTAAAAGATGCTGAAGATCAGTT
GGGTGCACGAGTGGGTTACATCGAACTGGATCTCAACAGCGGTAAGATCCTTGAGAGTTTTCGCCCCGAAGAAC
GTTTTCCAATGATGAGCACTTTTAAAGTTCTGCTATGTGGCGCGGTATTATCCCGTATTGACGCCGGGCAAGAGC
AACTCGGTCGCCGCATACACTATTCTCAGAATGACTTGGTTGAGTACTCACCAGTCACAGAAAAGCATCTTACGG
ATGGCATGACAGTAAGAGAATTATGCAGTGCTGCCATAACCATGAGTGATAACACTGCGGCCAACTTACTTCTGA
CAACGATCGGAGGACCGAAGGAGCTAACCGCTTTTTTGCACAACATGGGGGATCATGTAACTCGCCTTGATCGT
TGGGAACCGGAGCTGAATGAAGCCATACCAAACGACGAGCGTGACACCACGATGCCTGTAGCAATGGCAACAA
CGTTGCGCAAACTATTAACTGGCGAACTACTTACTCTAGCTTCCCGGCAACAATTAATAGACTGGATGGAGGCG
GATAAAGTTGCAGGACCACTTCTGCGCTCGGCCCTTCCGGCTGGCTGGTTTATTGCTGATAAATCTGGAGCCGG
TGAGCGTGGAAGCCGCGGTATCATTGCAGCACTGGGGCCAGATGGTAAGCCCTCCCGTATCGTAGTTATCTACA
CGACGGGGAGTCAGGCAACTATGGATGAACGAAATAGACAGATCGCTGAGATAGGTGCCTCACTGATTAAGCAT
TGGTAACTGTCAGACCAAGTTTACTCATATATACTTTAGATTGATTTAAAACTTCATTTTTAATTTAAAAGGATCTAG
GTGAAGATCCTTTTTGATAATCTCATGACCAAAATCCCTTAACGTGAGTTTTCGTTCCACTGAGCGTCAGACCCC
GTAGAAAAGATCAAAGGATCTTCTTGAGATCCTTTTTTTCTGCGCGTAATCTGCTGCTTGCAAACAAAAAAACCAC
CGCTACCAGCGGTGGTTTGTTTGCCGGATCAAGAGCTACCAACTCTTTTTCCGAAGGTAACTGGCTTCAGCAGA
GCGCAGATACCAAATACTGTTCTTCTAGTGTAGCCGTAGTTAGGCCACCACTTCAAGAACTCTGTAGCACCGCCT
ACATACCTCGCTCTGCTAATCCTGTTACCAGTGGCTGCTGCCAGTGGCGATAAGTCGTGTCTTACCGGGTTGGA
CTCAAGACGATAGTTACCGGATAAGGCGCAGCGGTCGGGCTGAACGGGGGGTTCGTGCACACAGCCCAGCTTG
GAGCGAACGACCTACACCGAACTGAGATACCTACAGCGTGAGCTATGAGAAAGCGCCACGCTTCCCGAAGGGA
GAAAGGCGGACAGGTATCCGGTAAGCGGCAGGGTCGGAACAGGAGAGCGCACGAGGGAGCTTCCAGGGGGA
AACGCCTGGTATCTTTATAGTCCTGTCGGGTTTCGCCACCTCTGACTTGAGCGTCGATTTTTGTGATGCTCGTCA
GGGGGGCGGAGCCTATGGAAAAACGCCAGCAACGCGGCCTTTTTACGGTTCCTGGCCTTTTGCTGGCCTTTTG
CTCACATGT
pAAV-CMV-sadCas9-U6gRNA(Gabra1-sa_sgRNA3) used in in vitro qPCR experiments (SEQ ID NO: 98)
CCTGCAGGCAGCTGCGCGCTCGCTCGCTCACTGAGGCCGCCCGGGCGTCGGGCGACCTTTGGTCGCCCGGCC
TCAGTGAGCGAGCGAGCGCGCAGAGAGGGAGTGGCCAACTCCATCACTAGGGGTTCCTGCGGCCTCTAGACTC
GAGGCGTTGACATTGATTATTGACTAGTTATTAATAGTAATCAATTACGGGGTCATTAGTTCATAGCCCATATATG
GAGTTCCGCGTTACATAACTTACGGTAAATGGCCCGCCTGGCTGACCGCCCAACGACCCCCGCCCATTGACGT
CAATAATGACGTATGTTCCCATAGTAACGCCAATAGGGACTTTCCATTGACGTCAATGGGTGGAGTATTTACGGT
AAACTGCCCACTTGGCAGTACATCAAGTGTATCATATGCCAAGTACGCCCCCTATTGACGTCAATGACGGTAAAT
GGCCCGCCTGGCATTATGCCCAGTACATGACCTTATGGGACTTTCCTACTTGGCAGTACATCTACGTATTAGTCA
TCGCTATTACCATGGTGATGCGGTTTTGGCAGTACATCAATGGGCGTGGATAGCGGTTTGACTCACGGGGATTT
CCAAGTCTCCACCCCATTGACGTCAATGGGAGTTTGTTTTGGCACCAAAATCAACGGGACTTTCCAAAATGTCGT
AACAACTCCGCCCCATTGACGCAAATGGGCGGTAGGCGTGTACGGTGGGAGGTCTATATAAGCAGAGCTCTCT
GGCTAACTACCGGTGCCACCATGGCCCCAAAGAAGAAGCGGAAGGTCGGTATCCACGGAGTCCCAGCAGCCAA
GCGGAACTACATCCTGGGCCTGGCCATCGGCATCACCAGCGTGGGCTACGGCATCATCGACTACGAGACACGG
GACGTGATCGATGCCGGCGTGCGGCTGTTCAAAGAGGCCAACGTGGAAAACAACGAGGGCAGGCGGAGCAAG
AGAGGCGCCAGAAGGCTGAAGCGGCGGAGGCGGCATAGAATCCAGAGAGTGAAGAAGCTGCTGTTCGACTAC
AACCTGCTGACCGACCACAGCGAGCTGAGCGGCATCAACCCCTACGAGGCCAGAGTGAAGGGCCTGAGCCAG
AAGCTGAGCGAGGAAGAGTTCTCTGCCGCCCTGCTGCACCTGGCCAAGAGAAGAGGCGTGCACAACGTGAACG
AGGTGGAAGAGGACACCGGCAACGAGCTGTCCACCAAAGAGCAGATCAGCCGGAACAGCAAGGCCCTGGAAG
AGAAATACGTGGCCGAACTGCAGCTGGAACGGCTGAAGAAAGACGGCGAAGTGCGGGGCAGCATCAACAGATT
CAAGACCAGCGACTACGTGAAAGAAGCCAAACAGCTGCTGAAGGTGCAGAAGGCCTACCACCAGCTGGACCAG
AGCTTCATCGACACCTACATCGACCTGCTGGAAACCCGGCGGACCTACTATGAGGGACCTGGCGAGGGCAGCC
CCTTCGGCTGGAAGGACATCAAAGAATGGTACGAGATGCTGATGGGCCACTGCACCTACTTCCCCGAGGAACT
GCGGAGCGTGAAGTACGCCTACAACGCCGACCTGTACAACGCCCTGAACGACCTGAACAATCTCGTGATCACC
AGGGACGAGAACGAGAAGCTGGAATATTACGAGAAGTTCCAGATCATCGAGAACGTGTTCAAGCAGAAGAAGAA
GCCCACCCTGAAGCAGATCGCCAAAGAAATCCTCGTGAACGAAGAGGATATTAAGGGCTACAGAGTGACCAGCA
CCGGCAAGCCCGAGTTCACCAACCTGAAGGTGTACCACGACATCAAGGACATTACCGCCCGGAAAGAGATTATT
GAGAACGCCGAGCTGCTGGATCAGATTGCCAAGATCCTGACCATCTACCAGAGCAGCGAGGACATCCAGGAAG
AACTGACCAATCTGAACTCCGAGCTGACCCAGGAAGAGATCGAGCAGATCTCTAATCTGAAGGGCTATACCGGC
ACCCACAACCTGAGCCTGAAGGCCATCAACCTGATCCTGGACGAGCTGTGGCACACCAACGACAACCAGATCG
CTATCTTCAACCGGCTGAAGCTGGTGCCCAAGAAGGTGGACCTGTCCCAGCAGAAAGAGATCCCCACCACCCT
GGTGGACGACTTCATCCTGAGCCCCGTCGTGAAGAGAAGCTTCATCCAGAGCATCAAAGTGATCAACGCCATCA
TCAAGAAGTACGGCCTGCCCAACGACATCATTATCGAGCTGGCCCGCGAGAAGAACTCCAAGGACGCCCAGAA
AATGATCAACGAGATGCAGAAGCGGAACCGGCAGACCAACGAGCGGATCGAGGAAATCATCCGGACCACCGGC
AAAGAGAACGCCAAGTACCTGATCGAGAAGATCAAGCTGCACGACATGCAGGAAGGCAAGTGCCTGTACAGCC
TGGAAGCCATCCCTCTGGAAGATCTGCTGAACAACCCCTTCAACTATGAGGTGGACCACATCATCCCCAGAAGC
GTGTCCTTCGACAACAGCTTCAACAACAAGGTGCTCGTGAAGCAGGAAGAAGCCAGCAAGAAGGGCAACCGGA
CCCCATTCCAGTACCTGAGCAGCAGCGACAGCAAGATCAGCTACGAAACCTTCAAGAAGCACATCCTGAATCTG
GCCAAGGGCAAGGGCAGAATCAGCAAGACCAAGAAAGAGTATCTGCTGGAAGAACGGGACATCAACAGGTTCT
CCGTGCAGAAAGACTTCATCAACCGGAACCTGGTGGATACCAGATACGCCACCAGAGGCCTGATGAACCTGCT
GCGGAGCTACTTCAGAGTGAACAACCTGGACGTGAAAGTGAAGTCCATCAATGGCGGCTTCACCAGCTTTCTGC
GGCGGAAGTGGAAGTTTAAGAAAGAGCGGAACAAGGGGTACAAGCACCACGCCGAGGACGCCCTGATCATTGC
CAACGCCGATTTCATCTTCAAAGAGTGGAAGAAACTGGACAAGGCCAAAAAAGTGATGGAAAACCAGATGTTCG
AGGAAAAGCAGGCCGAGAGCATGCCCGAGATCGAAACCGAGCAGGAGTACAAAGAGATCTTCATCACCCCCCA
CCAGATCAAGCACATTAAGGACTTCAAGGACTACAAGTACAGCCACCGGGTGGACAAGAAGCCTAATAGAGAGC
TGATTAACGACACCCTGTACTCCACCCGGAAGGACGACAAGGGCAACACCCTGATCGTGAACAATCTGAACGGC
CTGTACGACAAGGACAATGACAAGCTGAAAAAGCTGATCAACAAGAGCCCCGAAAAGCTGCTGATGTACCACCA
CGACCCCCAGACCTACCAGAAACTGAAGCTGATTATGGAACAGTACGGCGACGAGAAGAATCCCCTGTACAAGT
ACTACGAGGAAACCGGGAACTACCTGACCAAGTACTCCAAAAAGGACAACGGCCCCGTGATCAAGAAGATTAAG
TATTACGGCAACAAACTGAACGCCCATCTGGACATCACCGACGACTACCCCAACAGCAGAAACAAGGTCGTGAA
GCTGTCCCTGAAGCCCTACAGATTCGACGTGTACCTGGACAATGGCGTGTACAAGTTCGTGACCGTGAAGAATC
TGGATGTGATCAAAAAAGAAAACTACTACGAAGTGAATAGCAAGTGCTATGAGGAAGCTAAGAAGCTGAAGAAGA
TCAGCAACCAGGCCGAGTTTATCGCCTCCTTCTACAACAACGATCTGATCAAGATCAACGGCGAGCTGTATAGA
GTGATCGGCGTGAACAACGACCTGCTGAACCGGATCGAAGTGAACATGATCGACATCACCTACCGCGAGTACCT
GGAAAACATGAACGACAAGAGGCCCCCCAGGATCATTAAGACAATCGCCTCCAAGACCCAGAGCATTAAGAAGT
ACAGCACAGACATTCTGGGCAACCTGTATGAAGTGAAATCTAAGAAGCACCCTCAGATCATCAAAAAGGGCAAAA
GGCCGGCGGCCACGAAAAAGGCCGGCCAGGCAAAAAAGAAAAAGGGATCCGGACGGGCTGACGCATTGGACG
ATTTTGATCTGGATATGCTGGGAAGTGACGCCCTCGATGATTTTGACCTTGACATGCTTGGTTCGGATGCCCTTG
ATGACTTTGACCTCGACATGCTCGGCAGTGACGCCCTTGATGATTTCGACCTGGACATGCTGATTAACTGTACAG
GCAGTGGAGAGGGCAGAGGAAGTCTGCTAACATGCGGTGACGTCGAGGAGAATCCTGGCCCAATGGCCAAGC
CTTTGTCTCAAGAAGAATCCACCCTCATTGAAAGAGCAACGGCTACAATCAACAGCATCCCCATCTCTGAAGACT
ACAGCGTCGCCAGCGCAGCTCTCTCTAGCGACGGCCGCATCTTCACTGGTGTCAATGTATATCATTTTACTGGG
GGACCTTGTGCAGAACTCGTGGTGCTGGGCACTGCTGCTGCTGCGGCAGCTGGCAACCTGACTTGTATCGTCG
CGATCGGAAATGAGAACAGGGGCATCTTGAGCCCCTGCGGACGGTGCCGACAGGTGCTTCTCGATCTGCATCC
TGGGATCAAAGCCATAGTGAAGGACAGTGATGGACAGCCGACGGCAGTTGGGATTCGTGAATTGCTGCCCTCT
GGTTATGTGTGGGAGGGCTAAGAATTCCTAGAGCTCGCTGATCAGCCTCGACTGTGCCTTCTAGTTGCCAGCCA
TCTGTTGTTTGCCCCTCCCCCGTGCCTTCCTTGACCCTGGAAGGTGCCACTCCCACTGTCCTTTCCTAATAAAAT
GAGGAAATTGCATCGCATTGTCTGAGTAGGTGTCATTCTATTCTGGGGGGGGGGTGGGGCAGGACAGCAAGG
GGGAGGATTGGGAAGAGAATAGCAGGCATGCTGGGGAGGTACCGAGGGCCTATTTCCCATGATTCCTTCATATT
TGCATATACGATACAAGGCTGTTAGAGAGATAATTGGAATTAATTTGACTGTAAACACAAAGATATTAGTACAAAA
TACGTGACGTAGAAAGTAATAATTTCTTGGGTAGTTTGCAGTTTTAAAATTATGTTTTAAAATGGACTATCATATGC
TTACCGTAACTTGAAAGTATTTCGATTTCTTGGCTTTATATATCTTGTGGAAAGGACGAAAcaccgTGTATAGCTGC
AGATTGGATAgTTTTAGTACTCTGGAAACAGAATCTACTAAAACAAGGCAAAATGCCGTGTTTATCTCGTCAACTT
GTTGGCGAGATTTTTGCGGCCGCAGGAACCCCTAGTGATGGAGTTGGCCACTCCCTCTCTGCGCGCTCGCTCG
CTCACTGAGGCCGGGCGACCAAAGGTCGCCCGACGCCCGGGCTTTGCCCGGGCGGCCTCAGTGAGCGAGCG
AGCGCGCAGCTGCCTGCAGGGGCGCCTGATGCGGTATTTTCTCCTTACGCATCTGTGCGGTATTTCACACCGCA
TACGTCAAAGCAACCATAGTACGCGCCCTGTAGCGGCGCATTAAGCGCGGCGGGTGTGGTGGTTACGCGCAGC
GTGACCGCTACACTTGCCAGCGCCTTAGCGCCCGCTCCTTTCGCTTTCTTCCCTTCCTTTCTCGCCACGTTCGC
CGGCTTTCCCCGTCAAGCTCTAAATCGGGGGCTCCCTTTAGGGTTCCGATTTAGTGCTTTACGGCACCTCGACC
CCAAAAAACTTGATTTGGGTGATGGTTCACGTAGTGGGCCATCGCCCTGATAGACGGTTTTTCGCCCTTTGACGT
TGGAGTCCACGTTCTTTAATAGTGGACTCTTGTTCCAAACTGGAACAACACTCAACTCTATCTCGGGCTATTCTTT
TGATTTATAAGGGATTTTGCCGATTTCGGTCTATTGGTTAAAAAATGAGCTGATTTAACAAAAATTTAACGCGAATT
TTAACAAAATATTAACGTTTACAATTTTATGGTGCACTCTCAGTACAATCTGCTCTGATGCCGCATAGTTAAGCCA
GCCCCGACACCCGCCAACACCCGCTGACGCGCCCTGACGGGCTTGTCTGCTCCCGGCATCCGCTTACAGACAA
GCTGTGACCGTCTCCGGGAGCTGCATGTGTCAGAGGTTTTCACCGTCATCACCGAAACGCGCGAGACGAAAGG
GCCTCGTGATACGCCTATTTTTATAGGTTAATGTCATGATAATAATGGTTTCTTAGACGTCAGGTGGCACTTTTCG
GGGAAATGTGCGCGGAACCCCTATTTGTTTATTTTTCTAAATACATTCAAATATGTATCCGCTCATGAGACAATAA
CCCTGATAAATGCTTCAATAATATTGAAAAAGGAAGAGTATGAGTATTCAACATTTCCGTGTCGCCCTTATTCCCT
TTTTTGCGGCATTTTGCCTTCCTGTTTTTGCTCACCCAGAAACGCTGGTGAAAGTAAAAGATGCTGAAGATCAGTT
GGGTGCACGAGTGGGTTACATCGAACTGGATCTCAACAGCGGTAAGATCCTTGAGAGTTTTCGCCCCGAAGAAC
GTTTTCCAATGATGAGCACTTTTAAAGTTCTGCTATGTGGCGCGGTATTATCCCGTATTGACGCCGGGCAAGAGC
AACTCGGTCGCCGCATACACTATTCTCAGAATGACTTGGTTGAGTACTCACCAGTCACAGAAAAGCATCTTACGG
ATGGCATGACAGTAAGAGAATTATGCAGTGCTGCCATAACCATGAGTGATAACACTGCGGCCAACTTACTTCTGA
CAACGATCGGAGGACCGAAGGAGCTAACCGCTTTTTTGCACAACATGGGGGATCATGTAACTCGCCTTGATCGT
TGGGAACCGGAGCTGAATGAAGCCATACCAAACGACGAGCGTGACACCACGATGCCTGTAGCAATGGCAACAA
CGTTGCGCAAACTATTAACTGGCGAACTACTTACTCTAGCTTCCCGGCAACAATTAATAGACTGGATGGAGGCG
GATAAAGTTGCAGGACCACTTCTGCGCTCGGCCCTTCCGGCTGGCTGGTTTATTGCTGATAAATCTGGAGCCGG
TGAGCGTGGAAGCCGCGGTATCATTGCAGCACTGGGGCCAGATGGTAAGCCCTCCCGTATCGTAGTTATCTACA
CGACGGGGAGTCAGGCAACTATGGATGAACGAAATAGACAGATCGCTGAGATAGGTGCCTCACTGATTAAGCAT
TGGTAACTGTCAGACCAAGTTTACTCATATATACTTTAGATTGATTTAAAACTTCATTTTTAATTTAAAAGGATCTAG
GTGAAGATCCTTTTTGATAATCTCATGACCAAAATCCCTTAACGTGAGTTTTCGTTCCACTGAGCGTCAGACCCC
GTAGAAAAGATCAAAGGATCTTCTTGAGATCCTTTTTTTCTGCGCGTAATCTGCTGCTTGCAAACAAAAAAACCAC
CGCTACCAGCGGTGGTTTGTTTGCCGGATCAAGAGCTACCAACTCTTTTTCCGAAGGTAACTGGCTTCAGCAGA
GCGCAGATACCAAATACTGTTCTTCTAGTGTAGCCGTAGTTAGGCCACCACTTCAAGAACTCTGTAGCACCGCCT
ACATACCTCGCTCTGCTAATCCTGTTACCAGTGGCTGCTGCCAGTGGCGATAAGTCGTGTCTTACCGGGTTGGA
CTCAAGACGATAGTTACCGGATAAGGCGCAGCGGTCGGGCTGAACGGGGGGTTCGTGCACACAGCCCAGCTTG
GAGCGAACGACCTACACCGAACTGAGATACCTACAGCGTGAGCTATGAGAAAGCGCCACGCTTCCCGAAGGGA
GAAAGGCGGACAGGTATCCGGTAAGCGGCAGGGTCGGAACAGGAGAGCGCACGAGGGAGCTTCCAGGGGGA
AACGCCTGGTATCTTTATAGTCCTGTCGGGTTTCGCCACCTCTGACTTGAGCGTCGATTTTTGTGATGCTCGTCA
GGGGGGCGGAGCCTATGGAAAAACGCCAGCAACGCGGCCTTTTTACGGTTCCTGGCCTTTTGCTGGCCTTTTG
CTCACATGT
1.8 GABRA2
Nucleotide sequence of sasgRNA for mouse GABRA2; sgRNA1 (SEQ ID NO: 99)
GGGAGTAGCGATCGCAGGAGC
Nucleotide sequence of sasgRNA for mouse GABRA2; sgRNA2 (SEQ ID NO: 100)
AGGGAGTAGCGATCGCAGGAG
Nucleotide sequence of sasgRNA for mouse GABRA2; sgRNA3 (SEQ ID NO: 101)
TAGCGATCGCAGGAGCCGGGG
pAAV-CMV-sadCas9-U6gRNA(Gabra2-sa_sgRNA1) used in in vitro qPCR experiments (SEQ ID NO: 102)
CCTGCAGGCAGCTGCGCGCTCGCTCGCTCACTGAGGCCGCCCGGGCGTCGGGCGACCTTTGGTCGCCCGGCC
TCAGTGAGCGAGCGAGCGCGCAGAGAGGGAGTGGCCAACTCCATCACTAGGGGTTCCTGCGGCCTCTAGACTC
GAGGCGTTGACATTGATTATTGACTAGTTATTAATAGTAATCAATTACGGGGTCATTAGTTCATAGCCCATATATG
GAGTTCCGCGTTACATAACTTACGGTAAATGGCCCGCCTGGCTGACCGCCCAACGACCCCCGCCCATTGACGT
CAATAATGACGTATGTTCCCATAGTAACGCCAATAGGGACTTTCCATTGACGTCAATGGGTGGAGTATTTACGGT
AAACTGCCCACTTGGCAGTACATCAAGTGTATCATATGCCAAGTACGCCCCCTATTGACGTCAATGACGGTAAAT
GGCCCGCCTGGCATTATGCCCAGTACATGACCTTATGGGACTTTCCTACTTGGCAGTACATCTACGTATTAGTCA
TCGCTATTACCATGGTGATGCGGTTTTGGCAGTACATCAATGGGCGTGGATAGCGGTTTGACTCACGGGGATTT
CCAAGTCTCCACCCCATTGACGTCAATGGGAGTTTGTTTTGGCACCAAAATCAACGGGACTTTCCAAAATGTCGT
AACAACTCCGCCCCATTGACGCAAATGGGCGGTAGGCGTGTACGGTGGGAGGTCTATATAAGCAGAGCTCTCT
GGCTAACTACCGGTGCCACCATGGCCCCAAAGAAGAAGCGGAAGGTCGGTATCCACGGAGTCCCAGCAGCCAA
GCGGAACTACATCCTGGGCCTGGCCATCGGCATCACCAGCGTGGGCTACGGCATCATCGACTACGAGACACGG
GACGTGATCGATGCCGGCGTGCGGCTGTTCAAAGAGGCCAACGTGGAAAACAACGAGGGCAGGCGGAGCAAG
AGAGGCGCCAGAAGGCTGAAGCGGCGGAGGCGGCATAGAATCCAGAGAGTGAAGAAGCTGCTGTTCGACTAC
AACCTGCTGACCGACCACAGCGAGCTGAGCGGCATCAACCCCTACGAGGCCAGAGTGAAGGGCCTGAGCCAG
AAGCTGAGCGAGGAAGAGTTCTCTGCCGCCCTGCTGCACCTGGCCAAGAGAAGAGGCGTGCACAACGTGAACG
AGGTGGAAGAGGACACCGGCAACGAGCTGTCCACCAAAGAGCAGATCAGCCGGAACAGCAAGGCCCTGGAAG
AGAAATACGTGGCCGAACTGCAGCTGGAACGGCTGAAGAAAGACGGCGAAGTGCGGGGCAGCATCAACAGATT
CAAGACCAGCGACTACGTGAAAGAAGCCAAACAGCTGCTGAAGGTGCAGAAGGCCTACCACCAGCTGGACCAG
AGCTTCATCGACACCTACATCGACCTGCTGGAAACCCGGCGGACCTACTATGAGGGACCTGGCGAGGGCAGCC
CCTTCGGCTGGAAGGACATCAAAGAATGGTACGAGATGCTGATGGGCCACTGCACCTACTTCCCCGAGGAACT
GCGGAGCGTGAAGTACGCCTACAACGCCGACCTGTACAACGCCCTGAACGACCTGAACAATCTCGTGATCACC
AGGGACGAGAACGAGAAGCTGGAATATTACGAGAAGTTCCAGATCATCGAGAACGTGTTCAAGCAGAAGAAGAA
GCCCACCCTGAAGCAGATCGCCAAAGAAATCCTCGTGAACGAAGAGGATATTAAGGGCTACAGAGTGACCAGCA
CCGGCAAGCCCGAGTTCACCAACCTGAAGGTGTACCACGACATCAAGGACATTACCGCCCGGAAAGAGATTATT
GAGAACGCCGAGCTGCTGGATCAGATTGCCAAGATCCTGACCATCTACCAGAGCAGCGAGGACATCCAGGAAG
AACTGACCAATCTGAACTCCGAGCTGACCCAGGAAGAGATCGAGCAGATCTCTAATCTGAAGGGCTATACCGGC
ACCCACAACCTGAGCCTGAAGGCCATCAACCTGATCCTGGACGAGCTGTGGCACACCAACGACAACCAGATCG
CTATCTTCAACCGGCTGAAGCTGGTGCCCAAGAAGGTGGACCTGTCCCAGCAGAAAGAGATCCCCACCACCCT
GGTGGACGACTTCATCCTGAGCCCCGTCGTGAAGAGAAGCTTCATCCAGAGCATCAAAGTGATCAACGCCATCA
TCAAGAAGTACGGCCTGCCCAACGACATCATTATCGAGCTGGCCCGCGAGAAGAACTCCAAGGACGCCCAGAA
AATGATCAACGAGATGCAGAAGCGGAACCGGCAGACCAACGAGCGGATCGAGGAAATCATCCGGACCACCGGC
AAAGAGAACGCCAAGTACCTGATCGAGAAGATCAAGCTGCACGACATGCAGGAAGGCAAGTGCCTGTACAGCC
TGGAAGCCATCCCTCTGGAAGATCTGCTGAACAACCCCTTCAACTATGAGGTGGACCACATCATCCCCAGAAGC
GTGTCCTTCGACAACAGCTTCAACAACAAGGTGCTCGTGAAGCAGGAAGAAGCCAGCAAGAAGGGCAACCGGA
CCCCATTCCAGTACCTGAGCAGCAGCGACAGCAAGATCAGCTACGAAACCTTCAAGAAGCACATCCTGAATCTG
GCCAAGGGCAAGGGCAGAATCAGCAAGACCAAGAAAGAGTATCTGCTGGAAGAACGGGACATCAACAGGTTCT
CCGTGCAGAAAGACTTCATCAACCGGAACCTGGTGGATACCAGATACGCCACCAGAGGCCTGATGAACCTGCT
GCGGAGCTACTTCAGAGTGAACAACCTGGACGTGAAAGTGAAGTCCATCAATGGCGGCTTCACCAGCTTTCTGC
GGCGGAAGTGGAAGTTTAAGAAAGAGCGGAACAAGGGGTACAAGCACCACGCCGAGGACGCCCTGATCATTGC
CAACGCCGATTTCATCTTCAAAGAGTGGAAGAAACTGGACAAGGCCAAAAAAGTGATGGAAAACCAGATGTTCG
AGGAAAAGCAGGCCGAGAGCATGCCCGAGATCGAAACCGAGCAGGAGTACAAAGAGATCTTCATCACCCCCCA
CCAGATCAAGCACATTAAGGACTTCAAGGACTACAAGTACAGCCACCGGGTGGACAAGAAGCCTAATAGAGAGC
TGATTAACGACACCCTGTACTCCACCCGGAAGGACGACAAGGGCAACACCCTGATCGTGAACAATCTGAACGGC
CTGTACGACAAGGACAATGACAAGCTGAAAAAGCTGATCAACAAGAGCCCCGAAAAGCTGCTGATGTACCACCA
CGACCCCCAGACCTACCAGAAACTGAAGCTGATTATGGAACAGTACGGCGACGAGAAGAATCCCCTGTACAAGT
ACTACGAGGAAACCGGGAACTACCTGACCAAGTACTCCAAAAAGGACAACGGCCCCGTGATCAAGAAGATTAAG
TATTACGGCAACAAACTGAACGCCCATCTGGACATCACCGACGACTACCCCAACAGCAGAAACAAGGTCGTGAA
GCTGTCCCTGAAGCCCTACAGATTCGACGTGTACCTGGACAATGGCGTGTACAAGTTCGTGACCGTGAAGAATC
TGGATGTGATCAAAAAAGAAAACTACTACGAAGTGAATAGCAAGTGCTATGAGGAAGCTAAGAAGCTGAAGAAGA
TCAGCAACCAGGCCGAGTTTATCGCCTCCTTCTACAACAACGATCTGATCAAGATCAACGGCGAGCTGTATAGA
GTGATCGGCGTGAACAACGACCTGCTGAACCGGATCGAAGTGAACATGATCGACATCACCTACCGCGAGTACCT
GGAAAACATGAACGACAAGAGGCCCCCCAGGATCATTAAGACAATCGCCTCCAAGACCCAGAGCATTAAGAAGT
ACAGCACAGACATTCTGGGCAACCTGTATGAAGTGAAATCTAAGAAGCACCCTCAGATCATCAAAAAGGGCAAAA
GGCCGGCGGCCACGAAAAAGGCCGGCCAGGCAAAAAAGAAAAAGGGATCCGGACGGGCTGACGCATTGGACG
ATTTTGATCTGGATATGCTGGGAAGTGACGCCCTCGATGATTTTGACCTTGACATGCTTGGTTCGGATGCCCTTG
ATGACTTTGACCTCGACATGCTCGGCAGTGACGCCCTTGATGATTTCGACCTGGACATGCTGATTAACTGTACAG
GCAGTGGAGAGGGCAGAGGAAGTCTGCTAACATGCGGTGACGTCGAGGAGAATCCTGGCCCAATGGCCAAGC
CTTTGTCTCAAGAAGAATCCACCCTCATTGAAAGAGCAACGGCTACAATCAACAGCATCCCCATCTCTGAAGACT
ACAGCGTCGCCAGCGCAGCTCTCTCTAGCGACGGCCGCATCTTCACTGGTGTCAATGTATATCATTTTACTGGG
GGACCTTGTGCAGAACTCGTGGTGCTGGGCACTGCTGCTGCTGCGGCAGCTGGCAACCTGACTTGTATCGTCG
CGATCGGAAATGAGAACAGGGGCATCTTGAGCCCCTGCGGACGGTGCCGACAGGTGCTTCTCGATCTGCATCC
TGGGATCAAAGCCATAGTGAAGGACAGTGATGGACAGCCGACGGCAGTTGGGATTCGTGAATTGCTGCCCTCT
GGTTATGTGTGGGAGGGCTAAGAATTCCTAGAGCTCGCTGATCAGCCTCGACTGTGCCTTCTAGTTGCCAGCCA
TCTGTTGTTTGCCCCTCCCCCGTGCCTTCCTTGACCCTGGAAGGTGCCACTCCCACTGTCCTTTCCTAATAAAAT
GAGGAAATTGCATCGCATTGTCTGAGTAGGTGTCATTCTATTCTGGGGGGTGGGGTGGGGCAGGACAGCAAGG
GGGAGGATTGGGAAGAGAATAGCAGGCATGCTGGGGAGGTACCGAGGGCCTATTTCCCATGATTCCTTCATATT
TGCATATACGATACAAGGCTGTTAGAGAGATAATTGGAATTAATTTGACTGTAAACACAAAGATATTAGTACAAAA
TACGTGACGTAGAAAGTAATAATTTCTTGGGTAGTTTGCAGTTTTAAAATTATGTTTTAAAATGGACTATCATATGC
TTACCGTAACTTGAAAGTATTTCGATTTCTTGGCTTTATATATCTTGTGGAAAGGACGAAAcaccGGGAGTAGCGAT
CGCAGGAGCgTTTTAGTACTCTGGAAACAGAATCTACTAAAACAAGGCAAAATGCCGTGTTTATCTCGTCAACTT
GTTGGCGAGATTTTTGCGGCCGCAGGAACCCCTAGTGATGGAGTTGGCCACTCCCTCTCTGCGCGCTCGCTCG
CTCACTGAGGCCGGGCGACCAAAGGTCGCCCGACGCCCGGGCTTTGCCCGGGCGGCCTCAGTGAGCGAGCG
AGCGCGCAGCTGCCTGCAGGGGCGCCTGATGCGGTATTTTCTCCTTACGCATCTGTGCGGTATTTCACACCGCA
TACGTCAAAGCAACCATAGTACGCGCCCTGTAGCGGCGCATTAAGCGCGGCGGGTGTGGTGGTTACGCGCAGC
GTGACCGCTACACTTGCCAGCGCCTTAGCGCCCGCTCCTTTCGCTTTCTTCCCTTCCTTTCTCGCCACGTTCGC
CGGCTTTCCCCGTCAAGCTCTAAATCGGGGGCTCCCTTTAGGGTTCCGATTTAGTGCTTTACGGCACCTCGACC
CCAAAAAACTTGATTTGGGTGATGGTTCACGTAGTGGGCCATCGCCCTGATAGACGGTTTTTCGCCCTTTGACGT
TGGAGTCCACGTTCTTTAATAGTGGACTCTTGTTCCAAACTGGAACAACACTCAACTCTATCTCGGGCTATTCTTT
TGATTTATAAGGGATTTTGCCGATTTCGGTCTATTGGTTAAAAAATGAGCTGATTTAACAAAAATTTAACGCGAATT
TTAACAAAATATTAACGTTTACAATTTTATGGTGCACTCTCAGTACAATCTGCTCTGATGCCGCATAGTTAAGCCA
GCCCCGACACCCGCCAACACCCGCTGACGCGCCCTGACGGGCTTGTCTGCTCCCGGCATCCGCTTACAGACAA
GCTGTGACCGTCTCCGGGAGCTGCATGTGTCAGAGGTTTTCACCGTCATCACCGAAACGCGCGAGACGAAAGG
GCCTCGTGATACGCCTATTTTTATAGGTTAATGTCATGATAATAATGGTTTCTTAGACGTCAGGTGGCACTTTTCG
GGGAAATGTGCGCGGAACCCCTATTTGTTTATTTTTCTAAATACATTCAAATATGTATCCGCTCATGAGACAATAA
CCCTGATAAATGCTTCAATAATATTGAAAAAGGAAGAGTATGAGTATTCAACATTTCCGTGTCGCCCTTATTCCCT
TTTTTGCGGCATTTTGCCTTCCTGTTTTTGCTCACCCAGAAACGCTGGTGAAAGTAAAAGATGCTGAAGATCAGTT
GGGTGCACGAGTGGGTTACATCGAACTGGATCTCAACAGCGGTAAGATCCTTGAGAGTTTTCGCCCCGAAGAAC
GTTTTCCAATGATGAGCACTTTTAAAGTTCTGCTATGTGGCGCGGTATTATCCCGTATTGACGCCGGGCAAGAGC
AACTCGGTCGCCGCATACACTATTCTCAGAATGACTTGGTTGAGTACTCACCAGTCACAGAAAAGCATCTTACGG
ATGGCATGACAGTAAGAGAATTATGCAGTGCTGCCATAACCATGAGTGATAACACTGCGGCCAACTTACTTCTGA
CAACGATCGGAGGACCGAAGGAGCTAACCGCTTTTTTGCACAACATGGGGGATCATGTAACTCGCCTTGATCGT
TGGGAACCGGAGCTGAATGAAGCCATACCAAACGACGAGCGTGACACCACGATGCCTGTAGCAATGGCAACAA
CGTTGCGCAAACTATTAACTGGCGAACTACTTACTCTAGCTTCCCGGCAACAATTAATAGACTGGATGGAGGCG
GATAAAGTTGCAGGACCACTTCTGCGCTCGGCCCTTCCGGCTGGCTGGTTTATTGCTGATAAATCTGGAGCCGG
TGAGCGTGGAAGCCGCGGTATCATTGCAGCACTGGGGCCAGATGGTAAGCCCTCCCGTATCGTAGTTATCTACA
CGACGGGGAGTCAGGCAACTATGGATGAACGAAATAGACAGATCGCTGAGATAGGTGCCTCACTGATTAAGCAT
TGGTAACTGTCAGACCAAGTTTACTCATATATACTTTAGATTGATTTAAAACTTCATTTTTAATTTAAAAGGATCTAG
GTGAAGATCCTTTTTGATAATCTCATGACCAAAATCCCTTAACGTGAGTTTTCGTTCCACTGAGCGTCAGACCCC
GTAGAAAAGATCAAAGGATCTTCTTGAGATCCTTTTTTTCTGCGCGTAATCTGCTGCTTGCAAACAAAAAAACCAC
CGCTACCAGCGGTGGTTTGTTTGCCGGATCAAGAGCTACCAACTCTTTTTCCGAAGGTAACTGGCTTCAGCAGA
GCGCAGATACCAAATACTGTTCTTCTAGTGTAGCCGTAGTTAGGCCACCACTTCAAGAACTCTGTAGCACCGCCT
ACATACCTCGCTCTGCTAATCCTGTTACCAGTGGCTGCTGCCAGTGGCGATAAGTCGTGTCTTACCGGGTTGGA
CTCAAGACGATAGTTACCGGATAAGGCGCAGCGGTCGGGCTGAACGGGGGGTTCGTGCACACAGCCCAGCTTG
GAGCGAACGACCTACACCGAACTGAGATACCTACAGCGTGAGCTATGAGAAAGCGCCACGCTTCCCGAAGGGA
GAAAGGCGGACAGGTATCCGGTAAGCGGCAGGGTCGGAACAGGAGAGCGCACGAGGGAGCTTCCAGGGGGA
AACGCCTGGTATCTTTATAGTCCTGTCGGGTTTCGCCACCTCTGACTTGAGCGTCGATTTTTGTGATGCTCGTCA
GGGGGGCGGAGCCTATGGAAAAACGCCAGCAACGCGGCCTTTTTACGGTTCCTGGCCTTTTGCTGGCCTTTTG
CTCACATGT
pAAV-CMV-sadCas9-U6gRNA(Gabra2-sa_sgRNA2) used in in vitro qPCR experiments (SEQ ID NO: 103)
CCTGCAGGCAGCTGCGCGCTCGCTCGCTCACTGAGGCCGCCCGGGCGTCGGGCGACCTTTGGTCGCCCGGCC
TCAGTGAGCGAGCGAGCGCGCAGAGAGGGAGTGGCCAACTCCATCACTAGGGGTTCCTGCGGCCTCTAGACTC
GAGGCGTTGACATTGATTATTGACTAGTTATTAATAGTAATCAATTACGGGGTCATTAGTTCATAGCCCATATATG
GAGTTCCGCGTTACATAACTTACGGTAAATGGCCCGCCTGGCTGACCGCCCAACGACCCCCGCCCATTGACGT
CAATAATGACGTATGTTCCCATAGTAACGCCAATAGGGACTTTCCATTGACGTCAATGGGTGGAGTATTTACGGT
AAACTGCCCACTTGGCAGTACATCAAGTGTATCATATGCCAAGTACGCCCCCTATTGACGTCAATGACGGTAAAT
GGCCCGCCTGGCATTATGCCCAGTACATGACCTTATGGGACTTTCCTACTTGGCAGTACATCTACGTATTAGTCA
TCGCTATTACCATGGTGATGCGGTTTTGGCAGTACATCAATGGGCGTGGATAGCGGTTTGACTCACGGGGATTT
CCAAGTCTCCACCCCATTGACGTCAATGGGAGTTTGTTTTGGCACCAAAATCAACGGGACTTTCCAAAATGTCGT
AACAACTCCGCCCCATTGACGCAAATGGGCGGTAGGCGTGTACGGTGGGAGGTCTATATAAGCAGAGCTCTCT
GGCTAACTACCGGTGCCACCATGGCCCCAAAGAAGAAGCGGAAGGTCGGTATCCACGGAGTCCCAGCAGCCAA
GCGGAACTACATCCTGGGCCTGGCCATCGGCATCACCAGCGTGGGCTACGGCATCATCGACTACGAGACACGG
GACGTGATCGATGCCGGCGTGCGGCTGTTCAAAGAGGCCAACGTGGAAAACAACGAGGGCAGGCGGAGCAAG
AGAGGCGCCAGAAGGCTGAAGCGGCGGAGGCGGCATAGAATCCAGAGAGTGAAGAAGCTGCTGTTCGACTAC
AACCTGCTGACCGACCACAGCGAGCTGAGCGGCATCAACCCCTACGAGGCCAGAGTGAAGGGCCTGAGCCAG
AAGCTGAGCGAGGAAGAGTTCTCTGCCGCCCTGCTGCACCTGGCCAAGAGAAGAGGCGTGCACAACGTGAACG
AGGTGGAAGAGGACACCGGCAACGAGCTGTCCACCAAAGAGCAGATCAGCCGGAACAGCAAGGCCCTGGAAG
AGAAATACGTGGCCGAACTGCAGCTGGAACGGCTGAAGAAAGACGGCGAAGTGCGGGGCAGCATCAACAGATT
CAAGACCAGCGACTACGTGAAAGAAGCCAAACAGCTGCTGAAGGTGCAGAAGGCCTACCACCAGCTGGACCAG
AGCTTCATCGACACCTACATCGACCTGCTGGAAACCCGGCGGACCTACTATGAGGGACCTGGCGAGGGCAGCC
CCTTCGGCTGGAAGGACATCAAAGAATGGTACGAGATGCTGATGGGCCACTGCACCTACTTCCCCGAGGAACT
GCGGAGCGTGAAGTACGCCTACAACGCCGACCTGTACAACGCCCTGAACGACCTGAACAATCTCGTGATCACC
AGGGACGAGAACGAGAAGCTGGAATATTACGAGAAGTTCCAGATCATCGAGAACGTGTTCAAGCAGAAGAAGAA
GCCCACCCTGAAGCAGATCGCCAAAGAAATCCTCGTGAACGAAGAGGATATTAAGGGCTACAGAGTGACCAGCA
CCGGCAAGCCCGAGTTCACCAACCTGAAGGTGTACCACGACATCAAGGACATTACCGCCCGGAAAGAGATTATT
GAGAACGCCGAGCTGCTGGATCAGATTGCCAAGATCCTGACCATCTACCAGAGCAGCGAGGACATCCAGGAAG
AACTGACCAATCTGAACTCCGAGCTGACCCAGGAAGAGATCGAGCAGATCTCTAATCTGAAGGGCTATACCGGC
ACCCACAACCTGAGCCTGAAGGCCATCAACCTGATCCTGGACGAGCTGTGGCACACCAACGACAACCAGATCG
CTATCTTCAACCGGCTGAAGCTGGTGCCCAAGAAGGTGGACCTGTCCCAGCAGAAAGAGATCCCCACCACCCT
GGTGGACGACTTCATCCTGAGCCCCGTCGTGAAGAGAAGCTTCATCCAGAGCATCAAAGTGATCAACGCCATCA
TCAAGAAGTACGGCCTGCCCAACGACATCATTATCGAGCTGGCCCGCGAGAAGAACTCCAAGGACGCCCAGAA
AATGATCAACGAGATGCAGAAGCGGAACCGGCAGACCAACGAGCGGATCGAGGAAATCATCCGGACCACCGGC
AAAGAGAACGCCAAGTACCTGATCGAGAAGATCAAGCTGCACGACATGCAGGAAGGCAAGTGCCTGTACAGCC
TGGAAGCCATCCCTCTGGAAGATCTGCTGAACAACCCCTTCAACTATGAGGTGGACCACATCATCCCCAGAAGC
GTGTCCTTCGACAACAGCTTCAACAACAAGGTGCTCGTGAAGCAGGAAGAAGCCAGCAAGAAGGGCAACCGGA
CCCCATTCCAGTACCTGAGCAGCAGCGACAGCAAGATCAGCTACGAAACCTTCAAGAAGCACATCCTGAATCTG
GCCAAGGGCAAGGGCAGAATCAGCAAGACCAAGAAAGAGTATCTGCTGGAAGAACGGGACATCAACAGGTTCT
CCGTGCAGAAAGACTTCATCAACCGGAACCTGGTGGATACCAGATACGCCACCAGAGGCCTGATGAACCTGCT
GCGGAGCTACTTCAGAGTGAACAACCTGGACGTGAAAGTGAAGTCCATCAATGGCGGCTTCACCAGCTTTCTGC
GGCGGAAGTGGAAGTTTAAGAAAGAGCGGAACAAGGGGTACAAGCACCACGCCGAGGACGCCCTGATCATTGC
CAACGCCGATTTCATCTTCAAAGAGTGGAAGAAACTGGACAAGGCCAAAAAAGTGATGGAAAACCAGATGTTCG
AGGAAAAGCAGGCCGAGAGCATGCCCGAGATCGAAACCGAGCAGGAGTACAAAGAGATCTTCATCACCCCCCA
CCAGATCAAGCACATTAAGGACTTCAAGGACTACAAGTACAGCCACCGGGTGGACAAGAAGCCTAATAGAGAGC
TGATTAACGACACCCTGTACTCCACCCGGAAGGACGACAAGGGCAACACCCTGATCGTGAACAATCTGAACGGC
CTGTACGACAAGGACAATGACAAGCTGAAAAAGCTGATCAACAAGAGCCCCGAAAAGCTGCTGATGTACCACCA
CGACCCCCAGACCTACCAGAAACTGAAGCTGATTATGGAACAGTACGGCGACGAGAAGAATCCCCTGTACAAGT
ACTACGAGGAAACCGGGAACTACCTGACCAAGTACTCCAAAAAGGACAACGGCCCCGTGATCAAGAAGATTAAG
TATTACGGCAACAAACTGAACGCCCATCTGGACATCACCGACGACTACCCCAACAGCAGAAACAAGGTCGTGAA
GCTGTCCCTGAAGCCCTACAGATTCGACGTGTACCTGGACAATGGCGTGTACAAGTTCGTGACCGTGAAGAATC
TGGATGTGATCAAAAAAGAAAACTACTACGAAGTGAATAGCAAGTGCTATGAGGAAGCTAAGAAGCTGAAGAAGA
TCAGCAACCAGGCCGAGTTTATCGCCTCCTTCTACAACAACGATCTGATCAAGATCAACGGCGAGCTGTATAGA
GTGATCGGCGTGAACAACGACCTGCTGAACCGGATCGAAGTGAACATGATCGACATCACCTACCGCGAGTACCT
GGAAAACATGAACGACAAGAGGCCCCCCAGGATCATTAAGACAATCGCCTCCAAGACCCAGAGCATTAAGAAGT
ACAGCACAGACATTCTGGGCAACCTGTATGAAGTGAAATCTAAGAAGCACCCTCAGATCATCAAAAAGGGCAAAA
GGCCGGCGGCCACGAAAAAGGCCGGCCAGGCAAAAAAGAAAAAGGGATCCGGACGGGCTGACGCATTGGACG
ATTTTGATCTGGATATGCTGGGAAGTGACGCCCTCGATGATTTTGACCTTGACATGCTTGGTTCGGATGCCCTTG
ATGACTTTGACCTCGACATGCTCGGCAGTGACGCCCTTGATGATTTCGACCTGGACATGCTGATTAACTGTACAG
GCAGTGGAGAGGGCAGAGGAAGTCTGCTAACATGCGGTGACGTCGAGGAGAATCCTGGCCCAATGGCCAAGC
CTTTGTCTCAAGAAGAATCCACCCTCATTGAAAGAGCAACGGCTACAATCAACAGCATCCCCATCTCTGAAGACT
ACAGCGTCGCCAGCGCAGCTCTCTCTAGCGACGGCCGCATCTTCACTGGTGTCAATGTATATCATTTTACTGGG
GGACCTTGTGCAGAACTCGTGGTGCTGGGCACTGCTGCTGCTGCGGCAGCTGGCAACCTGACTTGTATCGTCG
CGATCGGAAATGAGAACAGGGGCATCTTGAGCCCCTGCGGACGGTGCCGACAGGTGCTTCTCGATCTGCATCC
TGGGATCAAAGCCATAGTGAAGGACAGTGATGGACAGCCGACGGCAGTTGGGATTCGTGAATTGCTGCCCTCT
GGTTATGTGTGGGAGGGCTAAGAATTCCTAGAGCTCGCTGATCAGCCTCGACTGTGCCTTCTAGTTGCCAGCCA
TCTGTTGTTTGCCCCTCCCCCGTGCCTTCCTTGACCCTGGAAGGTGCCACTCCCACTGTCCTTTCCTAATAAAAT
GAGGAAATTGCATCGCATTGTCTGAGTAGGTGTCATTCTATTCTGGGGGGTGGGGTGGGGCAGGACAGCAAGG
GGGAGGATTGGGAAGAGAATAGCAGGCATGCTGGGGAGGTACCGAGGGCCTATTTCCCATGATTCCTTCATATT
TGCATATACGATACAAGGCTGTTAGAGAGATAATTGGAATTAATTTGACTGTAAACACAAAGATATTAGTACAAAA
TACGTGACGTAGAAAGTAATAATTTCTTGGGTAGTTTGCAGTTTTAAAATTATGTTTTAAAATGGACTATCATATGC
TTACCGTAACTTGAAAGTATTTCGATTTCTTGGCTTTATATATCTTGTGGAAAGGACGAAAcaccgAGGGAGTAGCG
ATCGCAGGAGgTTTTAGTACTCTGGAAACAGAATCTACTAAAACAAGGCAAAATGCCGTGTTTATCTCGTCAACTT
GTTGGCGAGATTTTTGCGGCCGCAGGAACCCCTAGTGATGGAGTTGGCCACTCCCTCTCTGCGCGCTCGCTCG
CTCACTGAGGCCGGGCGACCAAAGGTCGCCCGACGCCCGGGCTTTGCCCGGGGGGCCTCAGTGAGCGAGCG
AGCGCGCAGCTGCCTGCAGGGGCGCCTGATGCGGTATTTTCTCCTTACGCATCTGTGCGGTATTTCACACCGCA
TACGTCAAAGCAACCATAGTACGCGCCCTGTAGCGGCGCATTAAGCGCGGCGGGTGTGGTGGTTACGCGCAGC
GTGACCGCTACACTTGCCAGCGCCTTAGCGCCCGCTCCTTTCGCTTTCTTCCCTTCCTTTCTCGCCACGTTCGC
CGGCTTTCCCCGTCAAGCTCTAAATCGGGGGCTCCCTTTAGGGTTCCGATTTAGTGCTTTACGGCACCTCGACC
CCAAAAAACTTGATTTGGGTGATGGTTCACGTAGTGGGCCATCGCCCTGATAGACGGTTTTTCGCCCTTTGACGT
TGGAGTCCACGTTCTTTAATAGTGGACTCTTGTTCCAAACTGGAACAACACTCAACTCTATCTCGGGCTATTCTTT
TGATTTATAAGGGATTTTGCCGATTTCGGTCTATTGGTTAAAAAATGAGCTGATTTAACAAAAATTTAACGCGAATT
TTAACAAAATATTAACGTTTACAATTTTATGGTGCACTCTCAGTACAATCTGCTCTGATGCCGCATAGTTAAGCCA
GCCCCGACACCCGCCAACACCCGCTGACGCGCCCTGACGGGCTTGTCTGCTCCCGGCATCCGCTTACAGACAA
GCTGTGACCGTCTCCGGGAGCTGCATGTGTCAGAGGTTTTCACCGTCATCACCGAAACGCGCGAGACGAAAGG
GCCTCGTGATACGCCTATTTTTATAGGTTAATGTCATGATAATAATGGTTTCTTAGACGTCAGGTGGCACTTTTCG
GGGAAATGTGCGCGGAACCCCTATTTGTTTATTTTTCTAAATACATTCAAATATGTATCCGCTCATGAGACAATAA
CCCTGATAAATGCTTCAATAATATTGAAAAAGGAAGAGTATGAGTATTCAACATTTCCGTGTCGCCCTTATTCCCT
TTTTTGCGGCATTTTGCCTTCCTGTTTTTGCTCACCCAGAAACGCTGGTGAAAGTAAAAGATGCTGAAGATCAGTT
GGGTGCACGAGTGGGTTACATCGAACTGGATCTCAACAGCGGTAAGATCCTTGAGAGTTTTCGCCCCGAAGAAC
GTTTTCCAATGATGAGCACTTTTAAAGTTCTGCTATGTGGCGCGGTATTATCCCGTATTGACGCCGGGCAAGAGC
AACTCGGTCGCCGCATACACTATTCTCAGAATGACTTGGTTGAGTACTCACCAGTCACAGAAAAGCATCTTACGG
ATGGCATGACAGTAAGAGAATTATGCAGTGCTGCCATAACCATGAGTGATAACACTGCGGCCAACTTACTTCTGA
CAACGATCGGAGGACCGAAGGAGCTAACCGCTTTTTTGCACAACATGGGGGATCATGTAACTCGCCTTGATCGT
TGGGAACCGGAGCTGAATGAAGCCATACCAAACGACGAGCGTGACACCACGATGCCTGTAGCAATGGCAACAA
CGTTGCGCAAACTATTAACTGGCGAACTACTTACTCTAGCTTCCCGGCAACAATTAATAGACTGGATGGAGGCG
GATAAAGTTGCAGGACCACTTCTGCGCTCGGCCCTTCCGGCTGGCTGGTTTATTGCTGATAAATCTGGAGCCGG
TGAGCGTGGAAGCCGCGGTATCATTGCAGCACTGGGGCCAGATGGTAAGCCCTCCCGTATCGTAGTTATCTACA
CGACGGGGAGTCAGGCAACTATGGATGAACGAAATAGACAGATCGCTGAGATAGGTGCCTCACTGATTAAGCAT
TGGTAACTGTCAGACCAAGTTTACTCATATATACTTTAGATTGATTTAAAACTTCATTTTTAATTTAAAAGGATCTAG
GTGAAGATCCTTTTTGATAATCTCATGACCAAAATCCCTTAACGTGAGTTTTCGTTCCACTGAGCGTCAGACCCC
GTAGAAAAGATCAAAGGATCTTCTTGAGATCCTTTTTTTCTGCGCGTAATCTGCTGCTTGCAAACAAAAAAACCAC
CGCTACCAGCGGTGGTTTGTTTGCCGGATCAAGAGCTACCAACTCTTTTTCCGAAGGTAACTGGCTTCAGCAGA
GCGCAGATACCAAATACTGTTCTTCTAGTGTAGCCGTAGTTAGGCCACCACTTCAAGAACTCTGTAGCACCGCCT
ACATACCTCGCTCTGCTAATCCTGTTACCAGTGGCTGCTGCCAGTGGCGATAAGTCGTGTCTTACCGGGTTGGA
CTCAAGACGATAGTTACCGGATAAGGCGCAGCGGTCGGGCTGAACGGGGGGTTCGTGCACACAGCCCAGCTTG
GAGCGAACGACCTACACCGAACTGAGATACCTACAGCGTGAGCTATGAGAAAGCGCCACGCTTCCCGAAGGGA
GAAAGGCGGACAGGTATCCGGTAAGCGGCAGGGTCGGAACAGGAGAGCGCACGAGGGAGCTTCCAGGGGGA
AACGCCTGGTATCTTTATAGTCCTGTCGGGTTTCGCCACCTCTGACTTGAGCGTCGATTTTTGTGATGCTCGTCA
GGGGGGCGGAGCCTATGGAAAAACGCCAGCAACGCGGCCTTTTTACGGTTCCTGGCCTTTTGCTGGCCTTTTG
CTCACATGT
pAAV-CMV-sadCas9-U6gRNA(Gabra2-sa_sgRNA3) used in in vitro qPCR experiments (SEQ ID NO: 104)
CCTGCAGGCAGCTGCGCGCTCGCTCGCTCACTGAGGCCGCCCGGGCGTCGGGCGACCTTTGGTCGCCCGGCC
TCAGTGAGCGAGCGAGCGCGCAGAGAGGGAGTGGCCAACTCCATCACTAGGGGTTCCTGCGGCCTCTAGACTC
GAGGCGTTGACATTGATTATTGACTAGTTATTAATAGTAATCAATTACGGGGTCATTAGTTCATAGCCCATATATG
GAGTTCCGCGTTACATAACTTACGGTAAATGGCCCGCCTGGCTGACCGCCCAACGACCCCCGCCCATTGACGT
CAATAATGACGTATGTTCCCATAGTAACGCCAATAGGGACTTTCCATTGACGTCAATGGGTGGAGTATTTACGGT
AAACTGCCCACTTGGCAGTACATCAAGTGTATCATATGCCAAGTACGCCCCCTATTGACGTCAATGACGGTAAAT
GGCCCGCCTGGCATTATGCCCAGTACATGACCTTATGGGACTTTCCTACTTGGCAGTACATCTACGTATTAGTCA
TCGCTATTACCATGGTGATGCGGTTTTGGCAGTACATCAATGGGCGTGGATAGCGGTTTGACTCACGGGGATTT
CCAAGTCTCCACCCCATTGACGTCAATGGGAGTTTGTTTTGGCACCAAAATCAACGGGACTTTCCAAAATGTCGT
AACAACTCCGCCCCATTGACGCAAATGGGCGGTAGGCGTGTACGGTGGGAGGTCTATATAAGCAGAGCTCTCT
GGCTAACTACCGGTGCCACCATGGCCCCAAAGAAGAAGCGGAAGGTCGGTATCCACGGAGTCCCAGCAGCCAA
GCGGAACTACATCCTGGGCCTGGCCATCGGCATCACCAGCGTGGGCTACGGCATCATCGACTACGAGACACGG
GACGTGATCGATGCCGGCGTGCGGCTGTTCAAAGAGGCCAACGTGGAAAACAACGAGGGCAGGCGGAGCAAG
AGAGGCGCCAGAAGGCTGAAGCGGCGGAGGCGGCATAGAATCCAGAGAGTGAAGAAGCTGCTGTTCGACTAC
AACCTGCTGACCGACCACAGCGAGCTGAGCGGCATCAACCCCTACGAGGCCAGAGTGAAGGGCCTGAGCCAG
AAGCTGAGCGAGGAAGAGTTCTCTGCCGCCCTGCTGCACCTGGCCAAGAGAAGAGGCGTGCACAACGTGAACG
AGGTGGAAGAGGACACCGGCAACGAGCTGTCCACCAAAGAGCAGATCAGCCGGAACAGCAAGGCCCTGGAAG
AGAAATACGTGGCCGAACTGCAGCTGGAACGGCTGAAGAAAGACGGCGAAGTGCGGGGCAGCATCAACAGATT
CAAGACCAGCGACTACGTGAAAGAAGCCAAACAGCTGCTGAAGGTGCAGAAGGCCTACCACCAGCTGGACCAG
AGCTTCATCGACACCTACATCGACCTGCTGGAAACCCGGCGGACCTACTATGAGGGACCTGGCGAGGGCAGCC
CCTTCGGCTGGAAGGACATCAAAGAATGGTACGAGATGCTGATGGGCCACTGCACCTACTTCCCCGAGGAACT
GCGGAGCGTGAAGTACGCCTACAACGCCGACCTGTACAACGCCCTGAACGACCTGAACAATCTCGTGATCACC
AGGGACGAGAACGAGAAGCTGGAATATTACGAGAAGTTCCAGATCATCGAGAACGTGTTCAAGCAGAAGAAGAA
GCCCACCCTGAAGCAGATCGCCAAAGAAATCCTCGTGAACGAAGAGGATATTAAGGGCTACAGAGTGACCAGCA
CCGGCAAGCCCGAGTTCACCAACCTGAAGGTGTACCACGACATCAAGGACATTACCGCCCGGAAAGAGATTATT
GAGAACGCCGAGCTGCTGGATCAGATTGCCAAGATCCTGACCATCTACCAGAGCAGCGAGGACATCCAGGAAG
AACTGACCAATCTGAACTCCGAGCTGACCCAGGAAGAGATCGAGCAGATCTCTAATCTGAAGGGCTATACCGGC
ACCCACAACCTGAGCCTGAAGGCCATCAACCTGATCCTGGACGAGCTGTGGCACACCAACGACAACCAGATCG
CTATCTTCAACCGGCTGAAGCTGGTGCCCAAGAAGGTGGACCTGTCCCAGCAGAAAGAGATCCCCACCACCCT
GGTGGACGACTTCATCCTGAGCCCCGTCGTGAAGAGAAGCTTCATCCAGAGCATCAAAGTGATCAACGCCATCA
TCAAGAAGTACGGCCTGCCCAACGACATCATTATCGAGCTGGCCCGCGAGAAGAACTCCAAGGACGCCCAGAA
AATGATCAACGAGATGCAGAAGCGGAACCGGCAGACCAACGAGCGGATCGAGGAAATCATCCGGACCACCGGC
AAAGAGAACGCCAAGTACCTGATCGAGAAGATCAAGCTGCACGACATGCAGGAAGGCAAGTGCCTGTACAGCC
TGGAAGCCATCCCTCTGGAAGATCTGCTGAACAACCCCTTCAACTATGAGGTGGACCACATCATCCCCAGAAGC
GTGTCCTTCGACAACAGCTTCAACAACAAGGTGCTCGTGAAGCAGGAAGAAGCCAGCAAGAAGGGCAACCGGA
CCCCATTCCAGTACCTGAGCAGCAGCGACAGCAAGATCAGCTACGAAACCTTCAAGAAGCACATCCTGAATCTG
GCCAAGGGCAAGGGCAGAATCAGCAAGACCAAGAAAGAGTATCTGCTGGAAGAACGGGACATCAACAGGTTCT
CCGTGCAGAAAGACTTCATCAACCGGAACCTGGTGGATACCAGATACGCCACCAGAGGCCTGATGAACCTGCT
GCGGAGCTACTTCAGAGTGAACAACCTGGACGTGAAAGTGAAGTCCATCAATGGCGGCTTCACCAGCTTTCTGC
GGCGGAAGTGGAAGTTTAAGAAAGAGCGGAACAAGGGGTACAAGCACCACGCCGAGGACGCCCTGATCATTGC
CAACGCCGATTTCATCTTCAAAGAGTGGAAGAAACTGGACAAGGCCAAAAAAGTGATGGAAAACCAGATGTTCG
AGGAAAAGCAGGCCGAGAGCATGCCCGAGATCGAAACCGAGCAGGAGTACAAAGAGATCTTCATCACCCCCCA
CCAGATCAAGCACATTAAGGACTTCAAGGACTACAAGTACAGCCACCGGGTGGACAAGAAGCCTAATAGAGAGC
TGATTAACGACACCCTGTACTCCACCCGGAAGGACGACAAGGGCAACACCCTGATCGTGAACAATCTGAACGGC
CTGTACGACAAGGACAATGACAAGCTGAAAAAGCTGATCAACAAGAGCCCCGAAAAGCTGCTGATGTACCACCA
CGACCCCCAGACCTACCAGAAACTGAAGCTGATTATGGAACAGTACGGCGACGAGAAGAATCCCCTGTACAAGT
ACTACGAGGAAACCGGGAACTACCTGACCAAGTACTCCAAAAAGGACAACGGCCCCGTGATCAAGAAGATTAAG
TATTACGGCAACAAACTGAACGCCCATCTGGACATCACCGACGACTACCCCAACAGCAGAAACAAGGTCGTGAA
GCTGTCCCTGAAGCCCTACAGATTCGACGTGTACCTGGACAATGGCGTGTACAAGTTCGTGACCGTGAAGAATC
TGGATGTGATCAAAAAAGAAAACTACTACGAAGTGAATAGCAAGTGCTATGAGGAAGCTAAGAAGCTGAAGAAGA
TCAGCAACCAGGCCGAGTTTATCGCCTCCTTCTACAACAACGATCTGATCAAGATCAACGGCGAGCTGTATAGA
GTGATCGGCGTGAACAACGACCTGCTGAACCGGATCGAAGTGAACATGATCGACATCACCTACCGCGAGTACCT
GGAAAACATGAACGACAAGAGGCCCCCCAGGATCATTAAGACAATCGCCTCCAAGACCCAGAGCATTAAGAAGT
ACAGCACAGACATTCTGGGCAACCTGTATGAAGTGAAATCTAAGAAGCACCCTCAGATCATCAAAAAGGGCAAAA
GGCCGGCGGCCACGAAAAAGGCCGGCCAGGCAAAAAAGAAAAAGGGATCCGGACGGGCTGACGCATTGGACG
ATTTTGATCTGGATATGCTGGGAAGTGACGCCCTCGATGATTTTGACCTTGACATGCTTGGTTCGGATGCCCTTG
ATGACTTTGACCTCGACATGCTCGGCAGTGACGCCCTTGATGATTTCGACCTGGACATGCTGATTAACTGTACAG
GCAGTGGAGAGGGCAGAGGAAGTCTGCTAACATGCGGTGACGTCGAGGAGAATCCTGGCCCAATGGCCAAGC
CTTTGTCTCAAGAAGAATCCACCCTCATTGAAAGAGCAACGGCTACAATCAACAGCATCCCCATCTCTGAAGACT
ACAGCGTCGCCAGCGCAGCTCTCTCTAGCGACGGCCGCATCTTCACTGGTGTCAATGTATATCATTTTACTGGG
GGACCTTGTGCAGAACTCGTGGTGCTGGGCACTGCTGCTGCTGCGGCAGCTGGCAACCTGACTTGTATCGTCG
CGATCGGAAATGAGAACAGGGGCATCTTGAGCCCCTGCGGACGGTGCCGACAGGTGCTTCTCGATCTGCATCC
TGGGATCAAAGCCATAGTGAAGGACAGTGATGGACAGCCGACGGCAGTTGGGATTCGTGAATTGCTGCCCTCT
GGTTATGTGTGGGAGGGCTAAGAATTCCTAGAGCTCGCTGATCAGCCTCGACTGTGCCTTCTAGTTGCCAGCCA
TCTGTTGTTTGCCCCTCCCCCGTGCCTTCCTTGACCCTGGAAGGTGCCACTCCCACTGTCCTTTCCTAATAAAAT
GAGGAAATTGCATCGCATTGTCTGAGTAGGTGTCATTCTATTCTGGGGGGTGGGGTGGGGCAGGACAGCAAGG
GGGAGGATTGGGAAGAGAATAGCAGGCATGCTGGGGAGGTACCGAGGGCCTATTTCCCATGATTCCTTCATATT
TGCATATACGATACAAGGCTGTTAGAGAGATAATTGGAATTAATTTGACTGTAAACACAAAGATATTAGTACAAAA
TACGTGACGTAGAAAGTAATAATTTCTTGGGTAGTTTGCAGTTTTAAAATTATGTTTTAAAATGGACTATCATATGC
TTACCGTAACTTGAAAGTATTTCGATTTCTTGGCTTTATATATCTTGTGGAAAGGACGAAAcaccgTAGCGATCGCA
GGAGCCGGGGgTTTTAGTACTCTGGAAACAGAATCTACTAAAACAAGGCAAAATGCCGTGTTTATCTCGTCAACT
TGTTGGCGAGATTTTTGCGGCCGCAGGAACCCCTAGTGATGGAGTTGGCCACTCCCTCTCTGCGCGCTCGCTC
GCTCACTGAGGCCGGGCGACCAAAGGTCGCCCGACGCCCGGGCTTTGCCCGGGCGGCCTCAGTGAGCGAGC
GAGCGCGCAGCTGCCTGCAGGGGCGCCTGATGCGGTATTTTCTCCTTACGCATCTGTGCGGTATTTCACACCG
CATACGTCAAAGCAACCATAGTACGCGCCCTGTAGCGGCGCATTAAGCGCGGCGGGTGTGGTGGTTACGCGCA
GCGTGACCGCTACACTTGCCAGCGCCTTAGCGCCCGCTCCTTTCGCTTTCTTCCCTTCCTTTCTCGCCACGTTC
GCCGGCTTTCCCCGTCAAGCTCTAAATCGGGGGCTCCCTTTAGGGTTCCGATTTAGTGCTTTACGGCACCTCGA
CCCCAAAAAACTTGATTTGGGTGATGGTTCACGTAGTGGGCCATCGCCCTGATAGACGGTTTTTCGCCCTTTGAC
GTTGGAGTCCACGTTCTTTAATAGTGGACTCTTGTTCCAAACTGGAACAACACTCAACTCTATCTCGGGCTATTCT
TTTGATTTATAAGGGATTTTGCCGATTTCGGTCTATTGGTTAAAAAATGAGCTGATTTAACAAAAATTTAACGCGAA
TTTTAACAAAATATTAACGTTTACAATTTTATGGTGCACTCTCAGTACAATCTGCTCTGATGCCGCATAGTTAAGCC
AGCCCCGACACCCGCCAACACCCGCTGACGCGCCCTGACGGGCTTGTCTGCTCCCGGCATCCGCTTACAGACA
AGCTGTGACCGTCTCCGGGAGCTGCATGTGTCAGAGGTTTTCACCGTCATCACCGAAACGCGCGAGACGAAAG
GGCCTCGTGATACGCCTATTTTTATAGGTTAATGTCATGATAATAATGGTTTCTTAGACGTCAGGTGGCACTTTTC
GGGGAAATGTGCGCGGAACCCCTATTTGTTTATTTTTCTAAATACATTCAAATATGTATCCGCTCATGAGACAATA
ACCCTGATAAATGCTTCAATAATATTGAAAAAGGAAGAGTATGAGTATTCAACATTTCCGTGTCGCCCTTATTCCC
TTTTTTGCGGCATTTTGCCTTCCTGTTTTTGCTCACCCAGAAACGCTGGTGAAAGTAAAAGATGCTGAAGATCAGT
TGGGTGCACGAGTGGGTTACATCGAACTGGATCTCAACAGCGGTAAGATCCTTGAGAGTTTTCGCCCCGAAGAA
CGTTTTCCAATGATGAGCACTTTTAAAGTTCTGCTATGTGGCGCGGTATTATCCCGTATTGACGCCGGGCAAGAG
CAACTCGGTCGCCGCATACACTATTCTCAGAATGACTTGGTTGAGTACTCACCAGTCACAGAAAAGCATCTTACG
GATGGCATGACAGTAAGAGAATTATGCAGTGCTGCCATAACCATGAGTGATAACACTGCGGCCAACTTACTTCTG
ACAACGATCGGAGGACCGAAGGAGCTAACCGCTTTTTTGCACAACATGGGGGATCATGTAACTCGCCTTGATCG
TTGGGAACCGGAGCTGAATGAAGCCATACCAAACGACGAGCGTGACACCACGATGCCTGTAGCAATGGCAACA
ACGTTGCGCAAACTATTAACTGGCGAACTACTTACTCTAGCTTCCCGGCAACAATTAATAGACTGGATGGAGGCG
GATAAAGTTGCAGGACCACTTCTGCGCTCGGCCCTTCCGGCTGGCTGGTTTATTGCTGATAAATCTGGAGCCGG
TGAGCGTGGAAGCCGCGGTATCATTGCAGCACTGGGGCCAGATGGTAAGCCCTCCCGTATCGTAGTTATCTACA
CGACGGGGAGTCAGGCAACTATGGATGAACGAAATAGACAGATCGCTGAGATAGGTGCCTCACTGATTAAGCAT
TGGTAACTGTCAGACCAAGTTTACTCATATATACTTTAGATTGATTTAAAACTTCATTTTTAATTTAAAAGGATCTAG
GTGAAGATCCTTTTTGATAATCTCATGACCAAAATCCCTTAACGTGAGTTTTCGTTCCACTGAGCGTCAGACCCC
GTAGAAAAGATCAAAGGATCTTCTTGAGATCCTTTTTTTCTGCGCGTAATCTGCTGCTTGCAAACAAAAAAACCAC
CGCTACCAGCGGTGGTTTGTTTGCCGGATCAAGAGCTACCAACTCTTTTTCCGAAGGTAACTGGCTTCAGCAGA
GCGCAGATACCAAATACTGTTCTTCTAGTGTAGCCGTAGTTAGGCCACCACTTCAAGAACTCTGTAGCACCGCCT
ACATACCTCGCTCTGCTAATCCTGTTACCAGTGGCTGCTGCCAGTGGCGATAAGTCGTGTCTTACCGGGTTGGA
CTCAAGACGATAGTTACCGGATAAGGCGCAGCGGTCGGGCTGAACGGGGGGTTCGTGCACACAGCCCAGCTTG
GAGCGAACGACCTACACCGAACTGAGATACCTACAGCGTGAGCTATGAGAAAGCGCCACGCTTCCCGAAGGGA
GAAAGGCGGACAGGTATCCGGTAAGCGGCAGGGTCGGAACAGGAGAGCGCACGAGGGAGCTTCCAGGGGGA
AACGCCTGGTATCTTTATAGTCCTGTCGGGTTTCGCCACCTCTGACTTGAGCGTCGATTTTTGTGATGCTCGTCA
GGGGGGCGGAGCCTATGGAAAAACGCCAGCAACGCGGCCTTTTTACGGTTCCTGGCCTTTTGCTGGCCTTTTG
CTCACATGT
1.9 NPY
Nucleotide sequence of sasgRNA for mouse NPY; sgRNA1 (SEQ ID NO: 105)
GGAGGCTGGAGCCACTGCCGC
Nucleotide sequence of sasgRNA for mouse NPY; sgRNA2 (SEQ ID NO: 106)
CTGGGGGCGGGAAGTGGCTGT
Nucleotide sequence of sasgRNA for mouse NPY; sgRNA3 (SEQ ID NO: 107)
ACTTCCCGCCCCCAGCGGCGG
pAAV-CMV-sadCas9-U6gRNA(Npy-sa_sgRNA1) used in in vitro qPCR experiments (SEQ ID NO: 108)
CCTGCAGGCAGCTGCGCGCTCGCTCGCTCACTGAGGCCGCCCGGGCGTCGGGCGACCTTTGGTCGCCCGGCC
TCAGTGAGCGAGCGAGCGCGCAGAGAGGGAGTGGCCAACTCCATCACTAGGGGTTCCTGCGGCCTCTAGACTC
GAGGCGTTGACATTGATTATTGACTAGTTATTAATAGTAATCAATTACGGGGTCATTAGTTCATAGCCCATATATG
GAGTTCCGCGTTACATAACTTACGGTAAATGGCCCGCCTGGCTGACCGCCCAACGACCCCCGCCCATTGACGT
CAATAATGACGTATGTTCCCATAGTAACGCCAATAGGGACTTTCCATTGACGTCAATGGGTGGAGTATTTACGGT
AAACTGCCCACTTGGCAGTACATCAAGTGTATCATATGCCAAGTACGCCCCCTATTGACGTCAATGACGGTAAAT
GGCCCGCCTGGCATTATGCCCAGTACATGACCTTATGGGACTTTCCTACTTGGCAGTACATCTACGTATTAGTCA
TCGCTATTACCATGGTGATGCGGTTTTGGCAGTACATCAATGGGCGTGGATAGCGGTTTGACTCACGGGGATTT
CCAAGTCTCCACCCCATTGACGTCAATGGGAGTTTGTTTTGGCACCAAAATCAACGGGACTTTCCAAAATGTCGT
AACAACTCCGCCCCATTGACGCAAATGGGCGGTAGGCGTGTACGGTGGGAGGTCTATATAAGCAGAGCTCTCT
GGCTAACTACCGGTGCCACCATGGCCCCAAAGAAGAAGCGGAAGGTCGGTATCCACGGAGTCCCAGCAGCCAA
GCGGAACTACATCCTGGGCCTGGCCATCGGCATCACCAGCGTGGGCTACGGCATCATCGACTACGAGACACGG
GACGTGATCGATGCCGGCGTGCGGCTGTTCAAAGAGGCCAACGTGGAAAACAACGAGGGCAGGCGGAGCAAG
AGAGGCGCCAGAAGGCTGAAGCGGCGGAGGCGGCATAGAATCCAGAGAGTGAAGAAGCTGCTGTTCGACTAC
AACCTGCTGACCGACCACAGCGAGCTGAGCGGCATCAACCCCTACGAGGCCAGAGTGAAGGGCCTGAGCCAG
AAGCTGAGCGAGGAAGAGTTCTCTGCCGCCCTGCTGCACCTGGCCAAGAGAAGAGGCGTGCACAACGTGAACG
AGGTGGAAGAGGACACCGGCAACGAGCTGTCCACCAAAGAGCAGATCAGCCGGAACAGCAAGGCCCTGGAAG
AGAAATACGTGGCCGAACTGCAGCTGGAACGGCTGAAGAAAGACGGCGAAGTGCGGGGCAGCATCAACAGATT
CAAGACCAGCGACTACGTGAAAGAAGCCAAACAGCTGCTGAAGGTGCAGAAGGCCTACCACCAGCTGGACCAG
AGCTTCATCGACACCTACATCGACCTGCTGGAAACCCGGCGGACCTACTATGAGGGACCTGGCGAGGGCAGCC
CCTTCGGCTGGAAGGACATCAAAGAATGGTACGAGATGCTGATGGGCCACTGCACCTACTTCCCCGAGGAACT
GCGGAGCGTGAAGTACGCCTACAACGCCGACCTGTACAACGCCCTGAACGACCTGAACAATCTCGTGATCACC
AGGGACGAGAACGAGAAGCTGGAATATTACGAGAAGTTCCAGATCATCGAGAACGTGTTCAAGCAGAAGAAGAA
GCCCACCCTGAAGCAGATCGCCAAAGAAATCCTCGTGAACGAAGAGGATATTAAGGGCTACAGAGTGACCAGCA
CCGGCAAGCCCGAGTTCACCAACCTGAAGGTGTACCACGACATCAAGGACATTACCGCCCGGAAAGAGATTATT
GAGAACGCCGAGCTGCTGGATCAGATTGCCAAGATCCTGACCATCTACCAGAGCAGCGAGGACATCCAGGAAG
AACTGACCAATCTGAACTCCGAGCTGACCCAGGAAGAGATCGAGCAGATCTCTAATCTGAAGGGCTATACCGGC
ACCCACAACCTGAGCCTGAAGGCCATCAACCTGATCCTGGACGAGCTGTGGCACACCAACGACAACCAGATCG
CTATCTTCAACCGGCTGAAGCTGGTGCCCAAGAAGGTGGACCTGTCCCAGCAGAAAGAGATCCCCACCACCCT
GGTGGACGACTTCATCCTGAGCCCCGTCGTGAAGAGAAGCTTCATCCAGAGCATCAAAGTGATCAACGCCATCA
TCAAGAAGTACGGCCTGCCCAACGACATCATTATCGAGCTGGCCCGCGAGAAGAACTCCAAGGACGCCCAGAA
AATGATCAACGAGATGCAGAAGCGGAACCGGCAGACCAACGAGCGGATCGAGGAAATCATCCGGACCACCGGC
AAAGAGAACGCCAAGTACCTGATCGAGAAGATCAAGCTGCACGACATGCAGGAAGGCAAGTGCCTGTACAGCC
TGGAAGCCATCCCTCTGGAAGATCTGCTGAACAACCCCTTCAACTATGAGGTGGACCACATCATCCCCAGAAGC
GTGTCCTTCGACAACAGCTTCAACAACAAGGTGCTCGTGAAGCAGGAAGAAGCCAGCAAGAAGGGCAACCGGA
CCCCATTCCAGTACCTGAGCAGCAGCGACAGCAAGATCAGCTACGAAACCTTCAAGAAGCACATCCTGAATCTG
GCCAAGGGCAAGGGCAGAATCAGCAAGACCAAGAAAGAGTATCTGCTGGAAGAACGGGACATCAACAGGTTCT
CCGTGCAGAAAGACTTCATCAACCGGAACCTGGTGGATACCAGATACGCCACCAGAGGCCTGATGAACCTGCT
GCGGAGCTACTTCAGAGTGAACAACCTGGACGTGAAAGTGAAGTCCATCAATGGCGGCTTCACCAGCTTTCTGC
GGCGGAAGTGGAAGTTTAAGAAAGAGCGGAACAAGGGGTACAAGCACCACGCCGAGGACGCCCTGATCATTGC
CAACGCCGATTTCATCTTCAAAGAGTGGAAGAAACTGGACAAGGCCAAAAAAGTGATGGAAAACCAGATGTTCG
AGGAAAAGCAGGCCGAGAGCATGCCCGAGATCGAAACCGAGCAGGAGTACAAAGAGATCTTCATCACCCCCCA
CCAGATCAAGCACATTAAGGACTTCAAGGACTACAAGTACAGCCACCGGGTGGACAAGAAGCCTAATAGAGAGC
TGATTAACGACACCCTGTACTCCACCCGGAAGGACGACAAGGGCAACACCCTGATCGTGAACAATCTGAACGGC
CTGTACGACAAGGACAATGACAAGCTGAAAAAGCTGATCAACAAGAGCCCCGAAAAGCTGCTGATGTACCACCA
CGACCCCCAGACCTACCAGAAACTGAAGCTGATTATGGAACAGTACGGCGACGAGAAGAATCCCCTGTACAAGT
ACTACGAGGAAACCGGGAACTACCTGACCAAGTACTCCAAAAAGGACAACGGCCCCGTGATCAAGAAGATTAAG
TATTACGGCAACAAACTGAACGCCCATCTGGACATCACCGACGACTACCCCAACAGCAGAAACAAGGTCGTGAA
GCTGTCCCTGAAGCCCTACAGATTCGACGTGTACCTGGACAATGGCGTGTACAAGTTCGTGACCGTGAAGAATC
TGGATGTGATCAAAAAAGAAAACTACTACGAAGTGAATAGCAAGTGCTATGAGGAAGCTAAGAAGCTGAAGAAGA
TCAGCAACCAGGCCGAGTTTATCGCCTCCTTCTACAACAACGATCTGATCAAGATCAACGGCGAGCTGTATAGA
GTGATCGGCGTGAACAACGACCTGCTGAACCGGATCGAAGTGAACATGATCGACATCACCTACCGCGAGTACCT
GGAAAACATGAACGACAAGAGGCCCCCCAGGATCATTAAGACAATCGCCTCCAAGACCCAGAGCATTAAGAAGT
ACAGCACAGACATTCTGGGCAACCTGTATGAAGTGAAATCTAAGAAGCACCCTCAGATCATCAAAAAGGGCAAAA
GGCCGGCGGCCACGAAAAAGGCCGGCCAGGCAAAAAAGAAAAAGGGATCCGGACGGGCTGACGCATTGGACG
ATTTTGATCTGGATATGCTGGGAAGTGACGCCCTCGATGATTTTGACCTTGACATGCTTGGTTCGGATGCCCTTG
ATGACTTTGACCTCGACATGCTCGGCAGTGACGCCCTTGATGATTTCGACCTGGACATGCTGATTAACTGTACAG
GCAGTGGAGAGGGCAGAGGAAGTCTGCTAACATGCGGTGACGTCGAGGAGAATCCTGGCCCAATGGCCAAGC
CTTTGTCTCAAGAAGAATCCACCCTCATTGAAAGAGCAACGGCTACAATCAACAGCATCCCCATCTCTGAAGACT
ACAGCGTCGCCAGCGCAGCTCTCTCTAGCGACGGCCGCATCTTCACTGGTGTCAATGTATATCATTTTACTGGG
GGACCTTGTGCAGAACTCGTGGTGCTGGGCACTGCTGCTGCTGCGGCAGCTGGCAACCTGACTTGTATCGTCG
CGATCGGAAATGAGAACAGGGGCATCTTGAGCCCCTGCGGACGGTGCCGACAGGTGCTTCTCGATCTGCATCC
TGGGATCAAAGCCATAGTGAAGGACAGTGATGGACAGCCGACGGCAGTTGGGATTCGTGAATTGCTGCCCTCT
GGTTATGTGTGGGAGGGCTAAGAATTCCTAGAGCTCGCTGATCAGCCTCGACTGTGCCTTCTAGTTGCCAGCCA
TCTGTTGTTTGCCCCTCCCCCGTGCCTTCCTTGACCCTGGAAGGTGCCACTCCCACTGTCCTTTCCTAATAAAAT
GAGGAAATTGCATCGCATTGTCTGAGTAGGTGTCATTCTATTCTGGGGGGTGGGGTGGGGCAGGACAGCAAGG
GGGAGGATTGGGAAGAGAATAGCAGGCATGCTGGGGAGGTACCGAGGGCCTATTTCCCATGATTCCTTCATATT
TGCATATACGATACAAGGCTGTTAGAGAGATAATTGGAATTAATTTGACTGTAAACACAAAGATATTAGTACAAAA
TACGTGACGTAGAAAGTAATAATTTCTTGGGTAGTTTGCAGTTTTAAAATTATGTTTTAAAATGGACTATCATATGC
TTACCGTAACTTGAAAGTATTTCGATTTCTTGGCTTTATATATCTTGTGGAAAGGACGAAAcaccGGAGGCTGGAG
CCACTGCCGCgTTTTAGTACTCTGGAAACAGAATCTACTAAAACAAGGCAAAATGCCGTGTTTATCTCGTCAACTT
GTTGGCGAGATTTTTGCGGCCGCAGGAACCCCTAGTGATGGAGTTGGCCACTCCCTCTCTGCGCGCTCGCTCG
CTCACTGAGGCCGGGCGACCAAAGGTCGCCCGACGCCCGGGCTTTGCCCGGGCGGCCTCAGTGAGCGAGCG
AGCGCGCAGCTGCCTGCAGGGGCGCCTGATGCGGTATTTTCTCCTTACGCATCTGTGCGGTATTTCACACCGCA
TACGTCAAAGCAACCATAGTACGCGCCCTGTAGCGGCGCATTAAGCGCGGCGGGTGTGGTGGTTACGCGCAGC
GTGACCGCTACACTTGCCAGCGCCTTAGCGCCCGCTCCTTTCGCTTTCTTCCCTTCCTTTCTCGCCACGTTCGC
CGGCTTTCCCCGTCAAGCTCTAAATCGGGGGCTCCCTTTAGGGTTCCGATTTAGTGCTTTACGGCACCTCGACC
CCAAAAAACTTGATTTGGGTGATGGTTCACGTAGTGGGCCATCGCCCTGATAGACGGTTTTTCGCCCTTTGACGT
TGGAGTCCACGTTCTTTAATAGTGGACTCTTGTTCCAAACTGGAACAACACTCAACTCTATCTCGGGCTATTCTTT
TGATTTATAAGGGATTTTGCCGATTTCGGTCTATTGGTTAAAAAATGAGCTGATTTAACAAAAATTTAACGCGAATT
TTAACAAAATATTAACGTTTACAATTTTATGGTGCACTCTCAGTACAATCTGCTCTGATGCCGCATAGTTAAGCCA
GCCCCGACACCCGCCAACACCCGCTGACGCGCCCTGACGGGCTTGTCTGCTCCCGGCATCCGCTTACAGACAA
GCTGTGACCGTCTCCGGGAGCTGCATGTGTCAGAGGTTTTCACCGTCATCACCGAAACGCGCGAGACGAAAGG
GCCTCGTGATACGCCTATTTTTATAGGTTAATGTCATGATAATAATGGTTTCTTAGACGTCAGGTGGCACTTTTCG
GGGAAATGTGCGCGGAACCCCTATTTGTTTATTTTTCTAAATACATTCAAATATGTATCCGCTCATGAGACAATAA
CCCTGATAAATGCTTCAATAATATTGAAAAAGGAAGAGTATGAGTATTCAACATTTCCGTGTCGCCCTTATTCCCT
TTTTTGCGGCATTTTGCCTTCCTGTTTTTGCTCACCCAGAAACGCTGGTGAAAGTAAAAGATGCTGAAGATCAGTT
GGGTGCACGAGTGGGTTACATCGAACTGGATCTCAACAGCGGTAAGATCCTTGAGAGTTTTCGCCCCGAAGAAC
GTTTTCCAATGATGAGCACTTTTAAAGTTCTGCTATGTGGCGCGGTATTATCCCGTATTGACGCCGGGCAAGAGC
AACTCGGTCGCCGCATACACTATTCTCAGAATGACTTGGTTGAGTACTCACCAGTCACAGAAAAGCATCTTACGG
ATGGCATGACAGTAAGAGAATTATGCAGTGCTGCCATAACCATGAGTGATAACACTGCGGCCAACTTACTTCTGA
CAACGATCGGAGGACCGAAGGAGCTAACCGCTTTTTTGCACAACATGGGGGATCATGTAACTCGCCTTGATCGT
TGGGAACCGGAGCTGAATGAAGCCATACCAAACGACGAGCGTGACACCACGATGCCTGTAGCAATGGCAACAA
CGTTGCGCAAACTATTAACTGGCGAACTACTTACTCTAGCTTCCCGGCAACAATTAATAGACTGGATGGAGGCG
GATAAAGTTGCAGGACCACTTCTGCGCTCGGCCCTTCCGGCTGGCTGGTTTATTGCTGATAAATCTGGAGCCGG
TGAGCGTGGAAGCCGCGGTATCATTGCAGCACTGGGGCCAGATGGTAAGCCCTCCCGTATCGTAGTTATCTACA
CGACGGGGAGTCAGGCAACTATGGATGAACGAAATAGACAGATCGCTGAGATAGGTGCCTCACTGATTAAGCAT
TGGTAACTGTCAGACCAAGTTTACTCATATATACTTTAGATTGATTTAAAACTTCATTTTTAATTTAAAAGGATCTAG
GTGAAGATCCTTTTTGATAATCTCATGACCAAAATCCCTTAACGTGAGTTTTCGTTCCACTGAGCGTCAGACCCC
GTAGAAAAGATCAAAGGATCTTCTTGAGATCCTTTTTTTCTGCGCGTAATCTGCTGCTTGCAAACAAAAAAACCAC
CGCTACCAGCGGTGGTTTGTTTGCCGGATCAAGAGCTACCAACTCTTTTTCCGAAGGTAACTGGCTTCAGCAGA
GCGCAGATACCAAATACTGTTCTTCTAGTGTAGCCGTAGTTAGGCCACCACTTCAAGAACTCTGTAGCACCGCCT
ACATACCTCGCTCTGCTAATCCTGTTACCAGTGGCTGCTGCCAGTGGCGATAAGTCGTGTCTTACCGGGTTGGA
CTCAAGACGATAGTTACCGGATAAGGCGCAGCGGTCGGGCTGAACGGGGGGTTCGTGCACACAGCCCAGCTTG
GAGCGAACGACCTACACCGAACTGAGATACCTACAGCGTGAGCTATGAGAAAGCGCCACGCTTCCCGAAGGGA
GAAAGGCGGACAGGTATCCGGTAAGCGGCAGGGTCGGAACAGGAGAGCGCACGAGGGAGCTTCCAGGGGGA
AACGCCTGGTATCTTTATAGTCCTGTCGGGTTTCGCCACCTCTGACTTGAGCGTCGATTTTTGTGATGCTCGTCA
GGGGGGCGGAGCCTATGGAAAAACGCCAGCAACGCGGCCTTTTTACGGTTCCTGGCCTTTTGCTGGCCTTTTG
CTCACATGT
pAAV-CMV-sadCas9-U6gRNA(Npy-sa_sgRNA2) used in in vitro qPCR experiments (SEQ ID NO: 109)
CCTGCAGGCAGCTGCGCGCTCGCTCGCTCACTGAGGCCGCCCGGGCGTCGGGCGACCTTTGGTCGCCCGGCC
TCAGTGAGCGAGCGAGCGCGCAGAGAGGGAGTGGCCAACTCCATCACTAGGGGTTCCTGCGGCCTCTAGACTC
GAGGCGTTGACATTGATTATTGACTAGTTATTAATAGTAATCAATTACGGGGTCATTAGTTCATAGCCCATATATG
GAGTTCCGCGTTACATAACTTACGGTAAATGGCCCGCCTGGCTGACCGCCCAACGACCCCCGCCCATTGACGT
CAATAATGACGTATGTTCCCATAGTAACGCCAATAGGGACTTTCCATTGACGTCAATGGGTGGAGTATTTACGGT
AAACTGCCCACTTGGCAGTACATCAAGTGTATCATATGCCAAGTACGCCCCCTATTGACGTCAATGACGGTAAAT
GGCCCGCCTGGCATTATGCCCAGTACATGACCTTATGGGACTTTCCTACTTGGCAGTACATCTACGTATTAGTCA
TCGCTATTACCATGGTGATGCGGTTTTGGCAGTACATCAATGGGCGTGGATAGCGGTTTGACTCACGGGGATTT
CCAAGTCTCCACCCCATTGACGTCAATGGGAGTTTGTTTTGGCACCAAAATCAACGGGACTTTCCAAAATGTCGT
AACAACTCCGCCCCATTGACGCAAATGGGCGGTAGGCGTGTACGGTGGGAGGTCTATATAAGCAGAGCTCTCT
GGCTAACTACCGGTGCCACCATGGCCCCAAAGAAGAAGCGGAAGGTCGGTATCCACGGAGTCCCAGCAGCCAA
GCGGAACTACATCCTGGGCCTGGCCATCGGCATCACCAGCGTGGGCTACGGCATCATCGACTACGAGACACGG
GACGTGATCGATGCCGGCGTGCGGCTGTTCAAAGAGGCCAACGTGGAAAACAACGAGGGCAGGCGGAGCAAG
AGAGGCGCCAGAAGGCTGAAGCGGCGGAGGCGGCATAGAATCCAGAGAGTGAAGAAGCTGCTGTTCGACTAC
AACCTGCTGACCGACCACAGCGAGCTGAGCGGCATCAACCCCTACGAGGCCAGAGTGAAGGGCCTGAGCCAG
AAGCTGAGCGAGGAAGAGTTCTCTGCCGCCCTGCTGCACCTGGCCAAGAGAAGAGGCGTGCACAACGTGAACG
AGGTGGAAGAGGACACCGGCAACGAGCTGTCCACCAAAGAGCAGATCAGCCGGAACAGCAAGGCCCTGGAAG
AGAAATACGTGGCCGAACTGCAGCTGGAACGGCTGAAGAAAGACGGCGAAGTGCGGGGCAGCATCAACAGATT
CAAGACCAGCGACTACGTGAAAGAAGCCAAACAGCTGCTGAAGGTGCAGAAGGCCTACCACCAGCTGGACCAG
AGCTTCATCGACACCTACATCGACCTGCTGGAAACCCGGCGGACCTACTATGAGGGACCTGGCGAGGGCAGCC
CCTTCGGCTGGAAGGACATCAAAGAATGGTACGAGATGCTGATGGGCCACTGCACCTACTTCCCCGAGGAACT
GCGGAGCGTGAAGTACGCCTACAACGCCGACCTGTACAACGCCCTGAACGACCTGAACAATCTCGTGATCACC
AGGGACGAGAACGAGAAGCTGGAATATTACGAGAAGTTCCAGATCATCGAGAACGTGTTCAAGCAGAAGAAGAA
GCCCACCCTGAAGCAGATCGCCAAAGAAATCCTCGTGAACGAAGAGGATATTAAGGGCTACAGAGTGACCAGCA
CCGGCAAGCCCGAGTTCACCAACCTGAAGGTGTACCACGACATCAAGGACATTACCGCCCGGAAAGAGATTATT
GAGAACGCCGAGCTGCTGGATCAGATTGCCAAGATCCTGACCATCTACCAGAGCAGCGAGGACATCCAGGAAG
AACTGACCAATCTGAACTCCGAGCTGACCCAGGAAGAGATCGAGCAGATCTCTAATCTGAAGGGCTATACCGGC
ACCCACAACCTGAGCCTGAAGGCCATCAACCTGATCCTGGACGAGCTGTGGCACACCAACGACAACCAGATCG
CTATCTTCAACCGGCTGAAGCTGGTGCCCAAGAAGGTGGACCTGTCCCAGCAGAAAGAGATCCCCACCACCCT
GGTGGACGACTTCATCCTGAGCCCCGTCGTGAAGAGAAGCTTCATCCAGAGCATCAAAGTGATCAACGCCATCA
TCAAGAAGTACGGCCTGCCCAACGACATCATTATCGAGCTGGCCCGCGAGAAGAACTCCAAGGACGCCCAGAA
AATGATCAACGAGATGCAGAAGCGGAACCGGCAGACCAACGAGCGGATCGAGGAAATCATCCGGACCACCGGC
AAAGAGAACGCCAAGTACCTGATCGAGAAGATCAAGCTGCACGACATGCAGGAAGGCAAGTGCCTGTACAGCC
TGGAAGCCATCCCTCTGGAAGATCTGCTGAACAACCCCTTCAACTATGAGGTGGACCACATCATCCCCAGAAGC
GTGTCCTTCGACAACAGCTTCAACAACAAGGTGCTCGTGAAGCAGGAAGAAGCCAGCAAGAAGGGCAACCGGA
CCCCATTCCAGTACCTGAGCAGCAGCGACAGCAAGATCAGCTACGAAACCTTCAAGAAGCACATCCTGAATCTG
GCCAAGGGCAAGGGCAGAATCAGCAAGACCAAGAAAGAGTATCTGCTGGAAGAACGGGACATCAACAGGTTCT
CCGTGCAGAAAGACTTCATCAACCGGAACCTGGTGGATACCAGATACGCCACCAGAGGCCTGATGAACCTGCT
GCGGAGCTACTTCAGAGTGAACAACCTGGACGTGAAAGTGAAGTCCATCAATGGCGGCTTCACCAGCTTTCTGC
GGCGGAAGTGGAAGTTTAAGAAAGAGCGGAACAAGGGGTACAAGCACCACGCCGAGGACGCCCTGATCATTGC
CAACGCCGATTTCATCTTCAAAGAGTGGAAGAAACTGGACAAGGCCAAAAAAGTGATGGAAAACCAGATGTTCG
AGGAAAAGCAGGCCGAGAGCATGCCCGAGATCGAAACCGAGCAGGAGTACAAAGAGATCTTCATCACCCCCCA
CCAGATCAAGCACATTAAGGACTTCAAGGACTACAAGTACAGCCACCGGGTGGACAAGAAGCCTAATAGAGAGC
TGATTAACGACACCCTGTACTCCACCCGGAAGGACGACAAGGGCAACACCCTGATCGTGAACAATCTGAACGGC
CTGTACGACAAGGACAATGACAAGCTGAAAAAGCTGATCAACAAGAGCCCCGAAAAGCTGCTGATGTACCACCA
CGACCCCCAGACCTACCAGAAACTGAAGCTGATTATGGAACAGTACGGCGACGAGAAGAATCCCCTGTACAAGT
ACTACGAGGAAACCGGGAACTACCTGACCAAGTACTCCAAAAAGGACAACGGCCCCGTGATCAAGAAGATTAAG
TATTACGGCAACAAACTGAACGCCCATCTGGACATCACCGACGACTACCCCAACAGCAGAAACAAGGTCGTGAA
GCTGTCCCTGAAGCCCTACAGATTCGACGTGTACCTGGACAATGGCGTGTACAAGTTCGTGACCGTGAAGAATC
TGGATGTGATCAAAAAAGAAAACTACTACGAAGTGAATAGCAAGTGCTATGAGGAAGCTAAGAAGCTGAAGAAGA
TCAGCAACCAGGCCGAGTTTATCGCCTCCTTCTACAACAACGATCTGATCAAGATCAACGGCGAGCTGTATAGA
GTGATCGGCGTGAACAACGACCTGCTGAACCGGATCGAAGTGAACATGATCGACATCACCTACCGCGAGTACCT
GGAAAACATGAACGACAAGAGGCCCCCCAGGATCATTAAGACAATCGCCTCCAAGACCCAGAGCATTAAGAAGT
ACAGCACAGACATTCTGGGCAACCTGTATGAAGTGAAATCTAAGAAGCACCCTCAGATCATCAAAAAGGGCAAAA
GGCCGGCGGCCACGAAAAAGGCCGGCCAGGCAAAAAAGAAAAAGGGATCCGGACGGGCTGACGCATTGGACG
ATTTTGATCTGGATATGCTGGGAAGTGACGCCCTCGATGATTTTGACCTTGACATGCTTGGTTCGGATGCCCTTG
ATGACTTTGACCTCGACATGCTCGGCAGTGACGCCCTTGATGATTTCGACCTGGACATGCTGATTAACTGTACAG
GCAGTGGAGAGGGCAGAGGAAGTCTGCTAACATGCGGTGACGTCGAGGAGAATCCTGGCCCAATGGCCAAGC
CTTTGTCTCAAGAAGAATCCACCCTCATTGAAAGAGCAACGGCTACAATCAACAGCATCCCCATCTCTGAAGACT
ACAGCGTCGCCAGCGCAGCTCTCTCTAGCGACGGCCGCATCTTCACTGGTGTCAATGTATATCATTTTACTGGG
GGACCTTGTGCAGAACTCGTGGTGCTGGGCACTGCTGCTGCTGCGGCAGCTGGCAACCTGACTTGTATCGTCG
CGATCGGAAATGAGAACAGGGGCATCTTGAGCCCCTGCGGACGGTGCCGACAGGTGCTTCTCGATCTGCATCC
TGGGATCAAAGCCATAGTGAAGGACAGTGATGGACAGCCGACGGCAGTTGGGATTCGTGAATTGCTGCCCTCT
GGTTATGTGTGGGAGGGCTAAGAATTCCTAGAGCTCGCTGATCAGCCTCGACTGTGCCTTCTAGTTGCCAGCCA
TCTGTTGTTTGCCCCTCCCCCGTGCCTTCCTTGACCCTGGAAGGTGCCACTCCCACTGTCCTTTCCTAATAAAAT
GAGGAAATTGCATCGCATTGTCTGAGTAGGTGTCATTCTATTCTGGGGGGTGGGGGGGGCAGGACAGCAAGG
GGGAGGATTGGGAAGAGAATAGCAGGCATGCTGGGGAGGTACCGAGGGCCTATTTCCCATGATTCCTTCATATT
TGCATATACGATACAAGGCTGTTAGAGAGATAATTGGAATTAATTTGACTGTAAACACAAAGATATTAGTACAAAA
TACGTGACGTAGAAAGTAATAATTTCTTGGGTAGTTTGCAGTTTTAAAATTATGTTTTAAAATGGACTATCATATGC
TTACCGTAACTTGAAAGTATTTCGATTTCTTGGCTTTATATATCTTGTGGAAAGGACGAAAcaccgCTGGGGGCGG
GAAGTGGCTGTgTTTTAGTACTCTGGAAACAGAATCTACTAAAACAAGGCAAAATGCCGTGTTTATCTCGTCAACT
TGTTGGCGAGATTTTTGCGGCCGCAGGAACCCCTAGTGATGGAGTTGGCCACTCCCTCTCTGCGCGCTCGCTC
GCTCACTGAGGCCGGGCGACCAAAGGTCGCCCGACGCCCGGGCTTTGCCCGGGCGGCCTCAGTGAGCGAGC
GAGCGCGCAGCTGCCTGCAGGGGCGCCTGATGCGGTATTTTCTCCTTACGCATCTGTGCGGTATTTCACACCG
CATACGTCAAAGCAACCATAGTACGCGCCCTGTAGCGGCGCATTAAGCGCGGCGGGTGTGGTGGTTACGCGCA
GCGTGACCGCTACACTTGCCAGCGCCTTAGCGCCCGCTCCTTTCGCTTTCTTCCCTTCCTTTCTCGCCACGTTC
GCCGGCTTTCCCCGTCAAGCTCTAAATCGGGGGCTCCCTTTAGGGTTCCGATTTAGTGCTTTACGGCACCTCGA
CCCCAAAAAACTTGATTTGGGTGATGGTTCACGTAGTGGGCCATCGCCCTGATAGACGGTTTTTCGCCCTTTGAC
GTTGGAGTCCACGTTCTTTAATAGTGGACTCTTGTTCCAAACTGGAACAACACTCAACTCTATCTCGGGCTATTCT
TTTGATTTATAAGGGATTTTGCCGATTTCGGTCTATTGGTTAAAAAATGAGCTGATTTAACAAAAATTTAACGCGAA
TTTTAACAAAATATTAACGTTTACAATTTTATGGTGCACTCTCAGTACAATCTGCTCTGATGCCGCATAGTTAAGCC
AGCCCCGACACCCGCCAACACCCGCTGACGCGCCCTGACGGGCTTGTCTGCTCCCGGCATCCGCTTACAGACA
AGCTGTGACCGTCTCCGGGAGCTGCATGTGTCAGAGGTTTTCACCGTCATCACCGAAACGCGCGAGACGAAAG
GGCCTCGTGATACGCCTATTTTTATAGGTTAATGTCATGATAATAATGGTTTCTTAGACGTCAGGTGGCACTTTTC
GGGGAAATGTGCGCGGAACCCCTATTTGTTTATTTTTCTAAATACATTCAAATATGTATCCGCTCATGAGACAATA
ACCCTGATAAATGCTTCAATAATATTGAAAAAGGAAGAGTATGAGTATTCAACATTTCCGTGTCGCCCTTATTCCC
TTTTTTGCGGCATTTTGCCTTCCTGTTTTTGCTCACCCAGAAACGCTGGTGAAAGTAAAAGATGCTGAAGATCAGT
TGGGTGCACGAGTGGGTTACATCGAACTGGATCTCAACAGCGGTAAGATCCTTGAGAGTTTTCGCCCCGAAGAA
CGTTTTCCAATGATGAGCACTTTTAAAGTTCTGCTATGTGGCGCGGTATTATCCCGTATTGACGCCGGGCAAGAG
CAACTCGGTCGCCGCATACACTATTCTCAGAATGACTTGGTTGAGTACTCACCAGTCACAGAAAAGCATCTTACG
GATGGCATGACAGTAAGAGAATTATGCAGTGCTGCCATAACCATGAGTGATAACACTGCGGCCAACTTACTTCTG
ACAACGATCGGAGGACCGAAGGAGCTAACCGCTTTTTTGCACAACATGGGGGATCATGTAACTCGCCTTGATCG
TTGGGAACCGGAGCTGAATGAAGCCATACCAAACGACGAGCGTGACACCACGATGCCTGTAGCAATGGCAACA
ACGTTGCGCAAACTATTAACTGGCGAACTACTTACTCTAGCTTCCCGGCAACAATTAATAGACTGGATGGAGGCG
GATAAAGTTGCAGGACCACTTCTGCGCTCGGCCCTTCCGGCTGGCTGGTTTATTGCTGATAAATCTGGAGCCGG
TGAGCGTGGAAGCCGCGGTATCATTGCAGCACTGGGGCCAGATGGTAAGCCCTCCCGTATCGTAGTTATCTACA
CGACGGGGAGTCAGGCAACTATGGATGAACGAAATAGACAGATCGCTGAGATAGGTGCCTCACTGATTAAGCAT
TGGTAACTGTCAGACCAAGTTTACTCATATATACTTTAGATTGATTTAAAACTTCATTTTTAATTTAAAAGGATCTAG
GTGAAGATCCTTTTTGATAATCTCATGACCAAAATCCCTTAACGTGAGTTTTCGTTCCACTGAGCGTCAGACCCC
GTAGAAAAGATCAAAGGATCTTCTTGAGATCCTTTTTTTCTGCGCGTAATCTGCTGCTTGCAAACAAAAAAACCAC
CGCTACCAGCGGTGGTTTGTTTGCCGGATCAAGAGCTACCAACTCTTTTTCCGAAGGTAACTGGCTTCAGCAGA
GCGCAGATACCAAATACTGTTCTTCTAGTGTAGCCGTAGTTAGGCCACCACTTCAAGAACTCTGTAGCACCGCCT
ACATACCTCGCTCTGCTAATCCTGTTACCAGTGGCTGCTGCCAGTGGCGATAAGTCGTGTCTTACCGGGTTGGA
CTCAAGACGATAGTTACCGGATAAGGCGCAGCGGTCGGGCTGAACGGGGGGTTCGTGCACACAGCCCAGCTTG
GAGCGAACGACCTACACCGAACTGAGATACCTACAGCGTGAGCTATGAGAAAGCGCCACGCTTCCCGAAGGGA
GAAAGGCGGACAGGTATCCGGTAAGCGGCAGGGTCGGAACAGGAGAGCGCACGAGGGAGCTTCCAGGGGGA
AACGCCTGGTATCTTTATAGTCCTGTCGGGTTTCGCCACCTCTGACTTGAGCGTCGATTTTTGTGATGCTCGTCA
GGGGGGCGGAGCCTATGGAAAAACGCCAGCAACGCGGCCTTTTTACGGTTCCTGGCCTTTTGCTGGCCTTTTG
CTCACATGT
pAAV-CMV-sadCas9-U6gRNA(Npy-sa_sgRNA3) used in in vitro qPCR experiments (SEQ ID NO: 110)
CCTGCAGGCAGCTGCGCGCTCGCTCGCTCACTGAGGCCGCCCGGGCGTCGGGCGACCTTTGGTCGCCCGGCC
TCAGTGAGCGAGCGAGCGCGCAGAGAGGGAGTGGCCAACTCCATCACTAGGGGTTCCTGCGGCCTCTAGACTC
GAGGCGTTGACATTGATTATTGACTAGTTATTAATAGTAATCAATTACGGGGTCATTAGTTCATAGCCCATATATG
GAGTTCCGCGTTACATAACTTACGGTAAATGGCCCGCCTGGCTGACCGCCCAACGACCCCCGCCCATTGACGT
CAATAATGACGTATGTTCCCATAGTAACGCCAATAGGGACTTTCCATTGACGTCAATGGGTGGAGTATTTACGGT
AAACTGCCCACTTGGCAGTACATCAAGTGTATCATATGCCAAGTACGCCCCCTATTGACGTCAATGACGGTAAAT
GGCCCGCCTGGCATTATGCCCAGTACATGACCTTATGGGACTTTCCTACTTGGCAGTACATCTACGTATTAGTCA
TCGCTATTACCATGGTGATGCGGTTTTGGCAGTACATCAATGGGCGTGGATAGCGGTTTGACTCACGGGGATTT
CCAAGTCTCCACCCCATTGACGTCAATGGGAGTTTGTTTTGGCACCAAAATCAACGGGACTTTCCAAAATGTCGT
AACAACTCCGCCCCATTGACGCAAATGGGCGGTAGGCGTGTACGGTGGGAGGTCTATATAAGCAGAGCTCTCT
GGCTAACTACCGGTGCCACCATGGCCCCAAAGAAGAAGCGGAAGGTCGGTATCCACGGAGTCCCAGCAGCCAA
GCGGAACTACATCCTGGGCCTGGCCATCGGCATCACCAGCGTGGGCTACGGCATCATCGACTACGAGACACGG
GACGTGATCGATGCCGGCGTGCGGCTGTTCAAAGAGGCCAACGTGGAAAACAACGAGGGCAGGCGGAGCAAG
AGAGGCGCCAGAAGGCTGAAGCGGCGGAGGCGGCATAGAATCCAGAGAGTGAAGAAGCTGCTGTTCGACTAC
AACCTGCTGACCGACCACAGCGAGCTGAGCGGCATCAACCCCTACGAGGCCAGAGTGAAGGGCCTGAGCCAG
AAGCTGAGCGAGGAAGAGTTCTCTGCCGCCCTGCTGCACCTGGCCAAGAGAAGAGGCGTGCACAACGTGAACG
AGGTGGAAGAGGACACCGGCAACGAGCTGTCCACCAAAGAGCAGATCAGCCGGAACAGCAAGGCCCTGGAAG
AGAAATACGTGGCCGAACTGCAGCTGGAACGGCTGAAGAAAGACGGCGAAGTGCGGGGCAGCATCAACAGATT
CAAGACCAGCGACTACGTGAAAGAAGCCAAACAGCTGCTGAAGGTGCAGAAGGCCTACCACCAGCTGGACCAG
AGCTTCATCGACACCTACATCGACCTGCTGGAAACCCGGCGGACCTACTATGAGGGACCTGGCGAGGGCAGCC
CCTTCGGCTGGAAGGACATCAAAGAATGGTACGAGATGCTGATGGGCCACTGCACCTACTTCCCCGAGGAACT
GCGGAGCGTGAAGTACGCCTACAACGCCGACCTGTACAACGCCCTGAACGACCTGAACAATCTCGTGATCACC
AGGGACGAGAACGAGAAGCTGGAATATTACGAGAAGTTCCAGATCATCGAGAACGTGTTCAAGCAGAAGAAGAA
GCCCACCCTGAAGCAGATCGCCAAAGAAATCCTCGTGAACGAAGAGGATATTAAGGGCTACAGAGTGACCAGCA
CCGGCAAGCCCGAGTTCACCAACCTGAAGGTGTACCACGACATCAAGGACATTACCGCCCGGAAAGAGATTATT
GAGAACGCCGAGCTGCTGGATCAGATTGCCAAGATCCTGACCATCTACCAGAGCAGCGAGGACATCCAGGAAG
AACTGACCAATCTGAACTCCGAGCTGACCCAGGAAGAGATCGAGCAGATCTCTAATCTGAAGGGCTATACCGGC
ACCCACAACCTGAGCCTGAAGGCCATCAACCTGATCCTGGACGAGCTGTGGCACACCAACGACAACCAGATCG
CTATCTTCAACCGGCTGAAGCTGGTGCCCAAGAAGGTGGACCTGTCCCAGCAGAAAGAGATCCCCACCACCCT
GGTGGACGACTTCATCCTGAGCCCCGTCGTGAAGAGAAGCTTCATCCAGAGCATCAAAGTGATCAACGCCATCA
TCAAGAAGTACGGCCTGCCCAACGACATCATTATCGAGCTGGCCCGCGAGAAGAACTCCAAGGACGCCCAGAA
AATGATCAACGAGATGCAGAAGCGGAACCGGCAGACCAACGAGCGGATCGAGGAAATCATCCGGACCACCGGC
AAAGAGAACGCCAAGTACCTGATCGAGAAGATCAAGCTGCACGACATGCAGGAAGGCAAGTGCCTGTACAGCC
TGGAAGCCATCCCTCTGGAAGATCTGCTGAACAACCCCTTCAACTATGAGGTGGACCACATCATCCCCAGAAGC
GTGTCCTTCGACAACAGCTTCAACAACAAGGTGCTCGTGAAGCAGGAAGAAGCCAGCAAGAAGGGCAACCGGA
CCCCATTCCAGTACCTGAGCAGCAGCGACAGCAAGATCAGCTACGAAACCTTCAAGAAGCACATCCTGAATCTG
GCCAAGGGCAAGGGCAGAATCAGCAAGACCAAGAAAGAGTATCTGCTGGAAGAACGGGACATCAACAGGTTCT
CCGTGCAGAAAGACTTCATCAACCGGAACCTGGTGGATACCAGATACGCCACCAGAGGCCTGATGAACCTGCT
GCGGAGCTACTTCAGAGTGAACAACCTGGACGTGAAAGTGAAGTCCATCAATGGCGGCTTCACCAGCTTTCTGC
GGCGGAAGTGGAAGTTTAAGAAAGAGCGGAACAAGGGGTACAAGCACCACGCCGAGGACGCCCTGATCATTGC
CAACGCCGATTTCATCTTCAAAGAGTGGAAGAAACTGGACAAGGCCAAAAAAGTGATGGAAAACCAGATGTTCG
AGGAAAAGCAGGCCGAGAGCATGCCCGAGATCGAAACCGAGCAGGAGTACAAAGAGATCTTCATCACCCCCCA
CCAGATCAAGCACATTAAGGACTTCAAGGACTACAAGTACAGCCACCGGGTGGACAAGAAGCCTAATAGAGAGC
TGATTAACGACACCCTGTACTCCACCCGGAAGGACGACAAGGGCAACACCCTGATCGTGAACAATCTGAACGGC
CTGTACGACAAGGACAATGACAAGCTGAAAAAGCTGATCAACAAGAGCCCCGAAAAGCTGCTGATGTACCACCA
CGACCCCCAGACCTACCAGAAACTGAAGCTGATTATGGAACAGTACGGCGACGAGAAGAATCCCCTGTACAAGT
ACTACGAGGAAACCGGGAACTACCTGACCAAGTACTCCAAAAAGGACAACGGCCCCGTGATCAAGAAGATTAAG
TATTACGGCAACAAACTGAACGCCCATCTGGACATCACCGACGACTACCCCAACAGCAGAAACAAGGTCGTGAA
GCTGTCCCTGAAGCCCTACAGATTCGACGTGTACCTGGACAATGGCGTGTACAAGTTCGTGACCGTGAAGAATC
TGGATGTGATCAAAAAAGAAAACTACTACGAAGTGAATAGCAAGTGCTATGAGGAAGCTAAGAAGCTGAAGAAGA
TCAGCAACCAGGCCGAGTTTATCGCCTCCTTCTACAACAACGATCTGATCAAGATCAACGGCGAGCTGTATAGA
GTGATCGGCGTGAACAACGACCTGCTGAACCGGATCGAAGTGAACATGATCGACATCACCTACCGCGAGTACCT
GGAAAACATGAACGACAAGAGGCCCCCCAGGATCATTAAGACAATCGCCTCCAAGACCCAGAGCATTAAGAAGT
ACAGCACAGACATTCTGGGCAACCTGTATGAAGTGAAATCTAAGAAGCACCCTCAGATCATCAAAAAGGGCAAAA
GGCCGGCGGCCACGAAAAAGGCCGGCCAGGCAAAAAAGAAAAAGGGATCCGGACGGGCTGACGCATTGGACG
ATTTTGATCTGGATATGCTGGGAAGTGACGCCCTCGATGATTTTGACCTTGACATGCTTGGTTCGGATGCCCTTG
ATGACTTTGACCTCGACATGCTCGGCAGTGACGCCCTTGATGATTTCGACCTGGACATGCTGATTAACTGTACAG
GCAGTGGAGAGGGCAGAGGAAGTCTGCTAACATGCGGTGACGTCGAGGAGAATCCTGGCCCAATGGCCAAGC
CTTTGTCTCAAGAAGAATCCACCCTCATTGAAAGAGCAACGGCTACAATCAACAGCATCCCCATCTCTGAAGACT
ACAGCGTCGCCAGCGCAGCTCTCTCTAGCGACGGCCGCATCTTCACTGGTGTCAATGTATATCATTTTACTGGG
GGACCTTGTGCAGAACTCGTGGTGCTGGGCACTGCTGCTGCTGCGGCAGCTGGCAACCTGACTTGTATCGTCG
CGATCGGAAATGAGAACAGGGGCATCTTGAGCCCCTGCGGACGGTGCCGACAGGTGCTTCTCGATCTGCATCC
TGGGATCAAAGCCATAGTGAAGGACAGTGATGGACAGCCGACGGCAGTTGGGATTCGTGAATTGCTGCCCTCT
GGTTATGTGTGGGAGGGCTAAGAATTCCTAGAGCTCGCTGATCAGCCTCGACTGTGCCTTCTAGTTGCCAGCCA
TCTGTTGTTTGCCCCTCCCCCGTGCCTTCCTTGACCCTGGAAGGTGCCACTCCCACTGTCCTTTCCTAATAAAAT
GAGGAAATTGCATCGCATTGTCTGAGTAGGTGTCATTCTATTCTGGGGGGTGGGGTGGGGCAGGACAGCAAGG
GGGAGGATTGGGAAGAGAATAGCAGGCATGCTGGGGAGGTACCGAGGGCCTATTTCCCATGATTCCTTCATATT
TGCATATACGATACAAGGCTGTTAGAGAGATAATTGGAATTAATTTGACTGTAAACACAAAGATATTAGTACAAAA
TACGTGACGTAGAAAGTAATAATTTCTTGGGTAGTTTGCAGTTTTAAAATTATGTTTTAAAATGGACTATCATATGC
TTACCGTAACTTGAAAGTATTTCGATTTCTTGGCTTTATATATCTTGTGGAAAGGACGAAAcaccgACTTCCCGCCC
CCAGCGGCGGgTTTTAGTACTCTGGAAACAGAATCTACTAAAACAAGGCAAAATGCCGTGTTTATCTCGTCAACT
TGTTGGCGAGATTTTTGCGGCCGCAGGAACCCCTAGTGATGGAGTTGGCCACTCCCTCTCTGCGCGCTCGCTC
GCTCACTGAGGCCGGGCGACCAAAGGTCGCCCGACGCCCGGGCTTTGCCCGGGCGGCCTCAGTGAGCGAGC
GAGCGCGCAGCTGCCTGCAGGGGCGCCTGATGCGGTATTTTCTCCTTACGCATCTGTGCGGTATTTCACACCG
CATACGTCAAAGCAACCATAGTACGCGCCCTGTAGCGGCGCATTAAGCGCGGCGGGTGTGGTGGTTACGCGCA
GCGTGACCGCTACACTTGCCAGCGCCTTAGCGCCCGCTCCTTTCGCTTTCTTCCCTTCCTTTCTCGCCACGTTC
GCCGGCTTTCCCCGTCAAGCTCTAAATCGGGGGCTCCCTTTAGGGTTCCGATTTAGTGCTTTACGGCACCTCGA
CCCCAAAAAACTTGATTTGGGTGATGGTTCACGTAGTGGGCCATCGCCCTGATAGACGGTTTTTCGCCCTTTGAC
GTTGGAGTCCACGTTCTTTAATAGTGGACTCTTGTTCCAAACTGGAACAACACTCAACTCTATCTCGGGCTATTCT
TTTGATTTATAAGGGATTTTGCCGATTTCGGTCTATTGGTTAAAAAATGAGCTGATTTAACAAAAATTTAACGCGAA
TTTTAACAAAATATTAACGTTTACAATTTTATGGTGCACTCTCAGTACAATCTGCTCTGATGCCGCATAGTTAAGCC
AGCCCCGACACCCGCCAACACCCGCTGACGCGCCCTGACGGGCTTGTCTGCTCCCGGCATCCGCTTACAGACA
AGCTGTGACCGTCTCCGGGAGCTGCATGTGTCAGAGGTTTTCACCGTCATCACCGAAACGCGCGAGACGAAAG
GGCCTCGTGATACGCCTATTTTTATAGGTTAATGTCATGATAATAATGGTTTCTTAGACGTCAGGTGGCACTTTTC
GGGGAAATGTGCGCGGAACCCCTATTTGTTTATTTTTCTAAATACATTCAAATATGTATCCGCTCATGAGACAATA
ACCCTGATAAATGCTTCAATAATATTGAAAAAGGAAGAGTATGAGTATTCAACATTTCCGTGTCGCCCTTATTCCC
TTTTTTGCGGCATTTTGCCTTCCTGTTTTTGCTCACCCAGAAACGCTGGTGAAAGTAAAAGATGCTGAAGATCAGT
TGGGTGCACGAGTGGGTTACATCGAACTGGATCTCAACAGCGGTAAGATCCTTGAGAGTTTTCGCCCCGAAGAA
CGTTTTCCAATGATGAGCACTTTTAAAGTTCTGCTATGTGGCGCGGTATTATCCCGTATTGACGCCGGGCAAGAG
CAACTCGGTCGCCGCATACACTATTCTCAGAATGACTTGGTTGAGTACTCACCAGTCACAGAAAAGCATCTTACG
GATGGCATGACAGTAAGAGAATTATGCAGTGCTGCCATAACCATGAGTGATAACACTGCGGCCAACTTACTTCTG
ACAACGATCGGAGGACCGAAGGAGCTAACCGCTTTTTTGCACAACATGGGGGATCATGTAACTCGCCTTGATCG
TTGGGAACCGGAGCTGAATGAAGCCATACCAAACGACGAGCGTGACACCACGATGCCTGTAGCAATGGCAACA
ACGTTGCGCAAACTATTAACTGGCGAACTACTTACTCTAGCTTCCCGGCAACAATTAATAGACTGGATGGAGGCG
GATAAAGTTGCAGGACCACTTCTGCGCTCGGCCCTTCCGGCTGGCTGGTTTATTGCTGATAAATCTGGAGCCGG
TGAGCGTGGAAGCCGCGGTATCATTGCAGCACTGGGGCCAGATGGTAAGCCCTCCCGTATCGTAGTTATCTACA
CGACGGGGAGTCAGGCAACTATGGATGAACGAAATAGACAGATCGCTGAGATAGGTGCCTCACTGATTAAGCAT
TGGTAACTGTCAGACCAAGTTTACTCATATATACTTTAGATTGATTTAAAACTTCATTTTTAATTTAAAAGGATCTAG
GTGAAGATCCTTTTTGATAATCTCATGACCAAAATCCCTTAACGTGAGTTTTCGTTCCACTGAGCGTCAGACCCC
GTAGAAAAGATCAAAGGATCTTCTTGAGATCCTTTTTTTCTGCGCGTAATCTGCTGCTTGCAAACAAAAAAACCAC
CGCTACCAGCGGTGGTTTGTTTGCCGGATCAAGAGCTACCAACTCTTTTTCCGAAGGTAACTGGCTTCAGCAGA
GCGCAGATACCAAATACTGTTCTTCTAGTGTAGCCGTAGTTAGGCCACCACTTCAAGAACTCTGTAGCACCGCCT
ACATACCTCGCTCTGCTAATCCTGTTACCAGTGGCTGCTGCCAGTGGCGATAAGTCGTGTCTTACCGGGTTGGA
CTCAAGACGATAGTTACCGGATAAGGCGCAGCGGTCGGGCTGAACGGGGGGTTCGTGCACACAGCCCAGCTTG
GAGCGAACGACCTACACCGAACTGAGATACCTACAGCGTGAGCTATGAGAAAGCGCCACGCTTCCCGAAGGGA
GAAAGGCGGACAGGTATCCGGTAAGCGGCAGGGTCGGAACAGGAGAGCGCACGAGGGAGCTTCCAGGGGGA
AACGCCTGGTATCTTTATAGTCCTGTCGGGTTTCGCCACCTCTGACTTGAGCGTCGATTTTTGTGATGCTCGTCA
GGGGGGCGGAGCCTATGGAAAAACGCCAGCAACGCGGCCTTTTTACGGTTCCTGGCCTTTTGCTGGCCTTTTG
CTCACATGT
1.10 NPYR2
Nucleotide sequence of sasgRNA for mouse NPYR2; sgRNA1 (SEQ ID NO: 111)
GGTAGGGGAACTGCGGAGCGA
Nucleotide sequence of sasgRNA for mouse NPYR2; sgRNA2 (SEQ ID NO: 112)
AAGGACACAGGTAGGGGAACT
Nucleotide sequence of sasgRNA for mouse NPYR2; sgRNA3 (SEQ ID NO: 113)
GGAGGAGGATCGGAGATAGAA
pAAV-CMV-sadCas9-U6gRNA(Npyr2-sa_sgRNA1) used in in vitro qPCR experiments (SEQ ID NO: 114)
CCTGCAGGCAGCTGCGCGCTCGCTCGCTCACTGAGGCCGCCCGGGCGTCGGGCGACCTTTGGTCGCCCGGCC
TCAGTGAGCGAGCGAGCGCGCAGAGAGGGAGTGGCCAACTCCATCACTAGGGGTTCCTGCGGCCTCTAGACTC
GAGGCGTTGACATTGATTATTGACTAGTTATTAATAGTAATCAATTACGGGGTCATTAGTTCATAGCCCATATATG
GAGTTCCGCGTTACATAACTTACGGTAAATGGCCCGCCTGGCTGACCGCCCAACGACCCCCGCCCATTGACGT
CAATAATGACGTATGTTCCCATAGTAACGCCAATAGGGACTTTCCATTGACGTCAATGGGTGGAGTATTTACGGT
AAACTGCCCACTTGGCAGTACATCAAGTGTATCATATGCCAAGTACGCCCCCTATTGACGTCAATGACGGTAAAT
GGCCCGCCTGGCATTATGCCCAGTACATGACCTTATGGGACTTTCCTACTTGGCAGTACATCTACGTATTAGTCA
TCGCTATTACCATGGTGATGCGGTTTTGGCAGTACATCAATGGGCGTGGATAGCGGTTTGACTCACGGGGATTT
CCAAGTCTCCACCCCATTGACGTCAATGGGAGTTTGTTTTGGCACCAAAATCAACGGGACTTTCCAAAATGTCGT
AACAACTCCGCCCCATTGACGCAAATGGGCGGTAGGCGTGTACGGTGGGAGGTCTATATAAGCAGAGCTCTCT
GGCTAACTACCGGTGCCACCATGGCCCCAAAGAAGAAGCGGAAGGTCGGTATCCACGGAGTCCCAGCAGCCAA
GCGGAACTACATCCTGGGCCTGGCCATCGGCATCACCAGCGTGGGCTACGGCATCATCGACTACGAGACACGG
GACGTGATCGATGCCGGCGTGCGGCTGTTCAAAGAGGCCAACGTGGAAAACAACGAGGGCAGGCGGAGCAAG
AGAGGCGCCAGAAGGCTGAAGCGGCGGAGGCGGCATAGAATCCAGAGAGTGAAGAAGCTGCTGTTCGACTAC
AACCTGCTGACCGACCACAGCGAGCTGAGCGGCATCAACCCCTACGAGGCCAGAGTGAAGGGCCTGAGCCAG
AAGCTGAGCGAGGAAGAGTTCTCTGCCGCCCTGCTGCACCTGGCCAAGAGAAGAGGCGTGCACAACGTGAACG
AGGTGGAAGAGGACACCGGCAACGAGCTGTCCACCAAAGAGCAGATCAGCCGGAACAGCAAGGCCCTGGAAG
AGAAATACGTGGCCGAACTGCAGCTGGAACGGCTGAAGAAAGACGGCGAAGTGCGGGGCAGCATCAACAGATT
CAAGACCAGCGACTACGTGAAAGAAGCCAAACAGCTGCTGAAGGTGCAGAAGGCCTACCACCAGCTGGACCAG
AGCTTCATCGACACCTACATCGACCTGCTGGAAACCCGGCGGACCTACTATGAGGGACCTGGCGAGGGCAGCC
CCTTCGGCTGGAAGGACATCAAAGAATGGTACGAGATGCTGATGGGCCACTGCACCTACTTCCCCGAGGAACT
GCGGAGCGTGAAGTACGCCTACAACGCCGACCTGTACAACGCCCTGAACGACCTGAACAATCTCGTGATCACC
AGGGACGAGAACGAGAAGCTGGAATATTACGAGAAGTTCCAGATCATCGAGAACGTGTTCAAGCAGAAGAAGAA
GCCCACCCTGAAGCAGATCGCCAAAGAAATCCTCGTGAACGAAGAGGATATTAAGGGCTACAGAGTGACCAGCA
CCGGCAAGCCCGAGTTCACCAACCTGAAGGTGTACCACGACATCAAGGACATTACCGCCCGGAAAGAGATTATT
GAGAACGCCGAGCTGCTGGATCAGATTGCCAAGATCCTGACCATCTACCAGAGCAGCGAGGACATCCAGGAAG
AACTGACCAATCTGAACTCCGAGCTGACCCAGGAAGAGATCGAGCAGATCTCTAATCTGAAGGGCTATACCGGC
ACCCACAACCTGAGCCTGAAGGCCATCAACCTGATCCTGGACGAGCTGTGGCACACCAACGACAACCAGATCG
CTATCTTCAACCGGCTGAAGCTGGTGCCCAAGAAGGTGGACCTGTCCCAGCAGAAAGAGATCCCCACCACCCT
GGTGGACGACTTCATCCTGAGCCCCGTCGTGAAGAGAAGCTTCATCCAGAGCATCAAAGTGATCAACGCCATCA
TCAAGAAGTACGGCCTGCCCAACGACATCATTATCGAGCTGGCCCGCGAGAAGAACTCCAAGGACGCCCAGAA
AATGATCAACGAGATGCAGAAGCGGAACCGGCAGACCAACGAGCGGATCGAGGAAATCATCCGGACCACCGGC
AAAGAGAACGCCAAGTACCTGATCGAGAAGATCAAGCTGCACGACATGCAGGAAGGCAAGTGCCTGTACAGCC
TGGAAGCCATCCCTCTGGAAGATCTGCTGAACAACCCCTTCAACTATGAGGTGGACCACATCATCCCCAGAAGC
GTGTCCTTCGACAACAGCTTCAACAACAAGGTGCTCGTGAAGCAGGAAGAAGCCAGCAAGAAGGGCAACCGGA
CCCCATTCCAGTACCTGAGCAGCAGCGACAGCAAGATCAGCTACGAAACCTTCAAGAAGCACATCCTGAATCTG
GCCAAGGGCAAGGGCAGAATCAGCAAGACCAAGAAAGAGTATCTGCTGGAAGAACGGGACATCAACAGGTTCT
CCGTGCAGAAAGACTTCATCAACCGGAACCTGGTGGATACCAGATACGCCACCAGAGGCCTGATGAACCTGCT
GCGGAGCTACTTCAGAGTGAACAACCTGGACGTGAAAGTGAAGTCCATCAATGGCGGCTTCACCAGCTTTCTGC
GGCGGAAGTGGAAGTTTAAGAAAGAGCGGAACAAGGGGTACAAGCACCACGCCGAGGACGCCCTGATCATTGC
CAACGCCGATTTCATCTTCAAAGAGTGGAAGAAACTGGACAAGGCCAAAAAAGTGATGGAAAACCAGATGTTCG
AGGAAAAGCAGGCCGAGAGCATGCCCGAGATCGAAACCGAGCAGGAGTACAAAGAGATCTTCATCACCCCCCA
CCAGATCAAGCACATTAAGGACTTCAAGGACTACAAGTACAGCCACCGGGTGGACAAGAAGCCTAATAGAGAGC
TGATTAACGACACCCTGTACTCCACCCGGAAGGACGACAAGGGCAACACCCTGATCGTGAACAATCTGAACGGC
CTGTACGACAAGGACAATGACAAGCTGAAAAAGCTGATCAACAAGAGCCCCGAAAAGCTGCTGATGTACCACCA
CGACCCCCAGACCTACCAGAAACTGAAGCTGATTATGGAACAGTACGGCGACGAGAAGAATCCCCTGTACAAGT
ACTACGAGGAAACCGGGAACTACCTGACCAAGTACTCCAAAAAGGACAACGGCCCCGTGATCAAGAAGATTAAG
TATTACGGCAACAAACTGAACGCCCATCTGGACATCACCGACGACTACCCCAACAGCAGAAACAAGGTCGTGAA
GCTGTCCCTGAAGCCCTACAGATTCGACGTGTACCTGGACAATGGCGTGTACAAGTTCGTGACCGTGAAGAATC
TGGATGTGATCAAAAAAGAAAACTACTACGAAGTGAATAGCAAGTGCTATGAGGAAGCTAAGAAGCTGAAGAAGA
TCAGCAACCAGGCCGAGTTTATCGCCTCCTTCTACAACAACGATCTGATCAAGATCAACGGCGAGCTGTATAGA
GTGATCGGCGTGAACAACGACCTGCTGAACCGGATCGAAGTGAACATGATCGACATCACCTACCGCGAGTACCT
GGAAAACATGAACGACAAGAGGCCCCCCAGGATCATTAAGACAATCGCCTCCAAGACCCAGAGCATTAAGAAGT
ACAGCACAGACATTCTGGGCAACCTGTATGAAGTGAAATCTAAGAAGCACCCTCAGATCATCAAAAAGGGCAAAA
GGCCGGCGGCCACGAAAAAGGCCGGCCAGGCAAAAAAGAAAAAGGGATCCGGACGGGCTGACGCATTGGACG
ATTTTGATCTGGATATGCTGGGAAGTGACGCCCTCGATGATTTTGACCTTGACATGCTTGGTTCGGATGCCCTTG
ATGACTTTGACCTCGACATGCTCGGCAGTGACGCCCTTGATGATTTCGACCTGGACATGCTGATTAACTGTACAG
GCAGTGGAGAGGGCAGAGGAAGTCTGCTAACATGCGGTGACGTCGAGGAGAATCCTGGCCCAATGGCCAAGC
CTTTGTCTCAAGAAGAATCCACCCTCATTGAAAGAGCAACGGCTACAATCAACAGCATCCCCATCTCTGAAGACT
ACAGCGTCGCCAGCGCAGCTCTCTCTAGCGACGGCCGCATCTTCACTGGTGTCAATGTATATCATTTTACTGGG
GGACCTTGTGCAGAACTCGTGGTGCTGGGCACTGCTGCTGCTGCGGCAGCTGGCAACCTGACTTGTATCGTCG
CGATCGGAAATGAGAACAGGGGCATCTTGAGCCCCTGCGGACGGTGCCGACAGGTGCTTCTCGATCTGCATCC
TGGGATCAAAGCCATAGTGAAGGACAGTGATGGACAGCCGACGGCAGTTGGGATTCGTGAATTGCTGCCCTCT
GGTTATGTGTGGGAGGGCTAAGAATTCCTAGAGCTCGCTGATCAGCCTCGACTGTGCCTTCTAGTTGCCAGCCA
TCTGTTGTTTGCCCCTCCCCCGTGCCTTCCTTGACCCTGGAAGGTGCCACTCCCACTGTCCTTTCCTAATAAAAT
GAGGAAATTGCATCGCATTGTCTGAGTAGGTGTCATTCTATTCTGGGGGGGGGGTGGGGCAGGACAGCAAGG
GGGAGGATTGGGAAGAGAATAGCAGGCATGCTGGGGAGGTACCGAGGGCCTATTTCCCATGATTCCTTCATATT
TGCATATACGATACAAGGCTGTTAGAGAGATAATTGGAATTAATTTGACTGTAAACACAAAGATATTAGTACAAAA
TACGTGACGTAGAAAGTAATAATTTCTTGGGTAGTTTGCAGTTTTAAAATTATGTTTTAAAATGGACTATCATATGC
TTACCGTAACTTGAAAGTATTTCGATTTCTTGGCTTTATATATCTTGTGGAAAGGACGAAAcaccGGTAGGGGAACT
GCGGAGCGAgTTTTAGTACTCTGGAAACAGAATCTACTAAAACAAGGCAAAATGCCGTGTTTATCTCGTCAACTT
GTTGGCGAGATTTTTGCGGCCGCAGGAACCCCTAGTGATGGAGTTGGCCACTCCCTCTCTGCGCGCTCGCTCG
CTCACTGAGGCCGGGCGACCAAAGGTCGCCCGACGCCCGGGCTTTGCCCGGGCGGCCTCAGTGAGCGAGCG
AGCGCGCAGCTGCCTGCAGGGGCGCCTGATGCGGTATTTTCTCCTTACGCATCTGTGCGGTATTTCACACCGCA
TACGTCAAAGCAACCATAGTACGCGCCCTGTAGCGGCGCATTAAGCGCGGCGGGTGTGGTGGTTACGCGCAGC
GTGACCGCTACACTTGCCAGCGCCTTAGCGCCCGCTCCTTTCGCTTTCTTCCCTTCCTTTCTCGCCACGTTCGC
CGGCTTTCCCCGTCAAGCTCTAAATCGGGGGCTCCCTTTAGGGTTCCGATTTAGTGCTTTACGGCACCTCGACC
CCAAAAAACTTGATTTGGGTGATGGTTCACGTAGTGGGCCATCGCCCTGATAGACGGTTTTTCGCCCTTTGACGT
TGGAGTCCACGTTCTTTAATAGTGGACTCTTGTTCCAAACTGGAACAACACTCAACTCTATCTCGGGCTATTCTTT
TGATTTATAAGGGATTTTGCCGATTTCGGTCTATTGGTTAAAAAATGAGCTGATTTAACAAAAATTTAACGCGAATT
TTAACAAAATATTAACGTTTACAATTTTATGGTGCACTCTCAGTACAATCTGCTCTGATGCCGCATAGTTAAGCCA
GCCCCGACACCCGCCAACACCCGCTGACGCGCCCTGACGGGCTTGTCTGCTCCCGGCATCCGCTTACAGACAA
GCTGTGACCGTCTCCGGGAGCTGCATGTGTCAGAGGTTTTCACCGTCATCACCGAAACGCGCGAGACGAAAGG
GCCTCGTGATACGCCTATTTTTATAGGTTAATGTCATGATAATAATGGTTTCTTAGACGTCAGGTGGCACTTTTCG
GGGAAATGTGCGCGGAACCCCTATTTGTTTATTTTTCTAAATACATTCAAATATGTATCCGCTCATGAGACAATAA
CCCTGATAAATGCTTCAATAATATTGAAAAAGGAAGAGTATGAGTATTCAACATTTCCGTGTCGCCCTTATTCCCT
TTTTTGCGGCATTTTGCCTTCCTGTTTTTGCTCACCCAGAAACGCTGGTGAAAGTAAAAGATGCTGAAGATCAGTT
GGGTGCACGAGTGGGTTACATCGAACTGGATCTCAACAGCGGTAAGATCCTTGAGAGTTTTCGCCCCGAAGAAC
GTTTTCCAATGATGAGCACTTTTAAAGTTCTGCTATGTGGCGCGGTATTATCCCGTATTGACGCCGGGCAAGAGC
AACTCGGTCGCCGCATACACTATTCTCAGAATGACTTGGTTGAGTACTCACCAGTCACAGAAAAGCATCTTACGG
ATGGCATGACAGTAAGAGAATTATGCAGTGCTGCCATAACCATGAGTGATAACACTGCGGCCAACTTACTTCTGA
CAACGATCGGAGGACCGAAGGAGCTAACCGCTTTTTTGCACAACATGGGGGATCATGTAACTCGCCTTGATCGT
TGGGAACCGGAGCTGAATGAAGCCATACCAAACGACGAGCGTGACACCACGATGCCTGTAGCAATGGCAACAA
CGTTGCGCAAACTATTAACTGGCGAACTACTTACTCTAGCTTCCCGGCAACAATTAATAGACTGGATGGAGGCG
GATAAAGTTGCAGGACCACTTCTGCGCTCGGCCCTTCCGGCTGGCTGGTTTATTGCTGATAAATCTGGAGCCGG
TGAGCGTGGAAGCCGCGGTATCATTGCAGCACTGGGGCCAGATGGTAAGCCCTCCCGTATCGTAGTTATCTACA
CGACGGGGAGTCAGGCAACTATGGATGAACGAAATAGACAGATCGCTGAGATAGGTGCCTCACTGATTAAGCAT
TGGTAACTGTCAGACCAAGTTTACTCATATATACTTTAGATTGATTTAAAACTTCATTTTTAATTTAAAAGGATCTAG
GTGAAGATCCTTTTTGATAATCTCATGACCAAAATCCCTTAACGTGAGTTTTCGTTCCACTGAGCGTCAGACCCC
GTAGAAAAGATCAAAGGATCTTCTTGAGATCCTTTTTTTCTGCGCGTAATCTGCTGCTTGCAAACAAAAAAACCAC
CGCTACCAGCGGTGGTTTGTTTGCCGGATCAAGAGCTACCAACTCTTTTTCCGAAGGTAACTGGCTTCAGCAGA
GCGCAGATACCAAATACTGTTCTTCTAGTGTAGCCGTAGTTAGGCCACCACTTCAAGAACTCTGTAGCACCGCCT
ACATACCTCGCTCTGCTAATCCTGTTACCAGTGGCTGCTGCCAGTGGCGATAAGTCGTGTCTTACCGGGTTGGA
CTCAAGACGATAGTTACCGGATAAGGCGCAGCGGTCGGGCTGAACGGGGGGTTCGTGCACACAGCCCAGCTTG
GAGCGAACGACCTACACCGAACTGAGATACCTACAGCGTGAGCTATGAGAAAGCGCCACGCTTCCCGAAGGGA
GAAAGGCGGACAGGTATCCGGTAAGCGGCAGGGTCGGAACAGGAGAGCGCACGAGGGAGCTTCCAGGGGGA
AACGCCTGGTATCTTTATAGTCCTGTCGGGTTTCGCCACCTCTGACTTGAGCGTCGATTTTTGTGATGCTCGTCA
GGGGGGCGGAGCCTATGGAAAAACGCCAGCAACGCGGCCTTTTTACGGTTCCTGGCCTTTTGCTGGCCTTTTG
CTCACATGT
pAAV-CMV-sadCas9-U6gRNA(Npyr2-sa_sgRNA2) used in in vitro qPCR experiments (SEQ ID NO: 115)
CCTGCAGGCAGCTGCGCGCTCGCTCGCTCACTGAGGCCGCCCGGGCGTCGGGCGACCTTTGGTCGCCCGGCC
TCAGTGAGCGAGCGAGCGCGCAGAGAGGGAGTGGCCAACTCCATCACTAGGGGTTCCTGCGGCCTCTAGACTC
GAGGCGTTGACATTGATTATTGACTAGTTATTAATAGTAATCAATTACGGGGTCATTAGTTCATAGCCCATATATG
GAGTTCCGCGTTACATAACTTACGGTAAATGGCCCGCCTGGCTGACCGCCCAACGACCCCCGCCCATTGACGT
CAATAATGACGTATGTTCCCATAGTAACGCCAATAGGGACTTTCCATTGACGTCAATGGGTGGAGTATTTACGGT
AAACTGCCCACTTGGCAGTACATCAAGTGTATCATATGCCAAGTACGCCCCCTATTGACGTCAATGACGGTAAAT
GGCCCGCCTGGCATTATGCCCAGTACATGACCTTATGGGACTTTCCTACTTGGCAGTACATCTACGTATTAGTCA
TCGCTATTACCATGGTGATGCGGTTTTGGCAGTACATCAATGGGCGTGGATAGCGGTTTGACTCACGGGGATTT
CCAAGTCTCCACCCCATTGACGTCAATGGGAGTTTGTTTTGGCACCAAAATCAACGGGACTTTCCAAAATGTCGT
AACAACTCCGCCCCATTGACGCAAATGGGCGGTAGGCGTGTACGGTGGGAGGTCTATATAAGCAGAGCTCTCT
GGCTAACTACCGGTGCCACCATGGCCCCAAAGAAGAAGCGGAAGGTCGGTATCCACGGAGTCCCAGCAGCCAA
GCGGAACTACATCCTGGGCCTGGCCATCGGCATCACCAGCGTGGGCTACGGCATCATCGACTACGAGACACGG
GACGTGATCGATGCCGGCGTGCGGCTGTTCAAAGAGGCCAACGTGGAAAACAACGAGGGCAGGCGGAGCAAG
AGAGGCGCCAGAAGGCTGAAGCGGCGGAGGCGGCATAGAATCCAGAGAGTGAAGAAGCTGCTGTTCGACTAC
AACCTGCTGACCGACCACAGCGAGCTGAGCGGCATCAACCCCTACGAGGCCAGAGTGAAGGGCCTGAGCCAG
AAGCTGAGCGAGGAAGAGTTCTCTGCCGCCCTGCTGCACCTGGCCAAGAGAAGAGGCGTGCACAACGTGAACG
AGGTGGAAGAGGACACCGGCAACGAGCTGTCCACCAAAGAGCAGATCAGCCGGAACAGCAAGGCCCTGGAAG
AGAAATACGTGGCCGAACTGCAGCTGGAACGGCTGAAGAAAGACGGCGAAGTGCGGGGCAGCATCAACAGATT
CAAGACCAGCGACTACGTGAAAGAAGCCAAACAGCTGCTGAAGGTGCAGAAGGCCTACCACCAGCTGGACCAG
AGCTTCATCGACACCTACATCGACCTGCTGGAAACCCGGCGGACCTACTATGAGGGACCTGGCGAGGGCAGCC
CCTTCGGCTGGAAGGACATCAAAGAATGGTACGAGATGCTGATGGGCCACTGCACCTACTTCCCCGAGGAACT
GCGGAGCGTGAAGTACGCCTACAACGCCGACCTGTACAACGCCCTGAACGACCTGAACAATCTCGTGATCACC
AGGGACGAGAACGAGAAGCTGGAATATTACGAGAAGTTCCAGATCATCGAGAACGTGTTCAAGCAGAAGAAGAA
GCCCACCCTGAAGCAGATCGCCAAAGAAATCCTCGTGAACGAAGAGGATATTAAGGGCTACAGAGTGACCAGCA
CCGGCAAGCCCGAGTTCACCAACCTGAAGGTGTACCACGACATCAAGGACATTACCGCCCGGAAAGAGATTATT
GAGAACGCCGAGCTGCTGGATCAGATTGCCAAGATCCTGACCATCTACCAGAGCAGCGAGGACATCCAGGAAG
AACTGACCAATCTGAACTCCGAGCTGACCCAGGAAGAGATCGAGCAGATCTCTAATCTGAAGGGCTATACCGGC
ACCCACAACCTGAGCCTGAAGGCCATCAACCTGATCCTGGACGAGCTGTGGCACACCAACGACAACCAGATCG
CTATCTTCAACCGGCTGAAGCTGGTGCCCAAGAAGGTGGACCTGTCCCAGCAGAAAGAGATCCCCACCACCCT
GGTGGACGACTTCATCCTGAGCCCCGTCGTGAAGAGAAGCTTCATCCAGAGCATCAAAGTGATCAACGCCATCA
TCAAGAAGTACGGCCTGCCCAACGACATCATTATCGAGCTGGCCCGCGAGAAGAACTCCAAGGACGCCCAGAA
AATGATCAACGAGATGCAGAAGCGGAACCGGCAGACCAACGAGCGGATCGAGGAAATCATCCGGACCACCGGC
AAAGAGAACGCCAAGTACCTGATCGAGAAGATCAAGCTGCACGACATGCAGGAAGGCAAGTGCCTGTACAGCC
TGGAAGCCATCCCTCTGGAAGATCTGCTGAACAACCCCTTCAACTATGAGGTGGACCACATCATCCCCAGAAGC
GTGTCCTTCGACAACAGCTTCAACAACAAGGTGCTCGTGAAGCAGGAAGAAGCCAGCAAGAAGGGCAACCGGA
CCCCATTCCAGTACCTGAGCAGCAGCGACAGCAAGATCAGCTACGAAACCTTCAAGAAGCACATCCTGAATCTG
GCCAAGGGCAAGGGCAGAATCAGCAAGACCAAGAAAGAGTATCTGCTGGAAGAACGGGACATCAACAGGTTCT
CCGTGCAGAAAGACTTCATCAACCGGAACCTGGTGGATACCAGATACGCCACCAGAGGCCTGATGAACCTGCT
GCGGAGCTACTTCAGAGTGAACAACCTGGACGTGAAAGTGAAGTCCATCAATGGCGGCTTCACCAGCTTTCTGC
GGCGGAAGTGGAAGTTTAAGAAAGAGCGGAACAAGGGGTACAAGCACCACGCCGAGGACGCCCTGATCATTGC
CAACGCCGATTTCATCTTCAAAGAGTGGAAGAAACTGGACAAGGCCAAAAAAGTGATGGAAAACCAGATGTTCG
AGGAAAAGCAGGCCGAGAGCATGCCCGAGATCGAAACCGAGCAGGAGTACAAAGAGATCTTCATCACCCCCCA
CCAGATCAAGCACATTAAGGACTTCAAGGACTACAAGTACAGCCACCGGGTGGACAAGAAGCCTAATAGAGAGC
TGATTAACGACACCCTGTACTCCACCCGGAAGGACGACAAGGGCAACACCCTGATCGTGAACAATCTGAACGGC
CTGTACGACAAGGACAATGACAAGCTGAAAAAGCTGATCAACAAGAGCCCCGAAAAGCTGCTGATGTACCACCA
CGACCCCCAGACCTACCAGAAACTGAAGCTGATTATGGAACAGTACGGCGACGAGAAGAATCCCCTGTACAAGT
ACTACGAGGAAACCGGGAACTACCTGACCAAGTACTCCAAAAAGGACAACGGCCCCGTGATCAAGAAGATTAAG
TATTACGGCAACAAACTGAACGCCCATCTGGACATCACCGACGACTACCCCAACAGCAGAAACAAGGTCGTGAA
GCTGTCCCTGAAGCCCTACAGATTCGACGTGTACCTGGACAATGGCGTGTACAAGTTCGTGACCGTGAAGAATC
TGGATGTGATCAAAAAAGAAAACTACTACGAAGTGAATAGCAAGTGCTATGAGGAAGCTAAGAAGCTGAAGAAGA
TCAGCAACCAGGCCGAGTTTATCGCCTCCTTCTACAACAACGATCTGATCAAGATCAACGGCGAGCTGTATAGA
GTGATCGGCGTGAACAACGACCTGCTGAACCGGATCGAAGTGAACATGATCGACATCACCTACCGCGAGTACCT
GGAAAACATGAACGACAAGAGGCCCCCCAGGATCATTAAGACAATCGCCTCCAAGACCCAGAGCATTAAGAAGT
ACAGCACAGACATTCTGGGCAACCTGTATGAAGTGAAATCTAAGAAGCACCCTCAGATCATCAAAAAGGGCAAAA
GGCCGGCGGCCACGAAAAAGGCCGGCCAGGCAAAAAAGAAAAAGGGATCCGGACGGGCTGACGCATTGGACG
ATTTTGATCTGGATATGCTGGGAAGTGACGCCCTCGATGATTTTGACCTTGACATGCTTGGTTCGGATGCCCTTG
ATGACTTTGACCTCGACATGCTCGGCAGTGACGCCCTTGATGATTTCGACCTGGACATGCTGATTAACTGTACAG
GCAGTGGAGAGGGCAGAGGAAGTCTGCTAACATGCGGTGACGTCGAGGAGAATCCTGGCCCAATGGCCAAGC
CTTTGTCTCAAGAAGAATCCACCCTCATTGAAAGAGCAACGGCTACAATCAACAGCATCCCCATCTCTGAAGACT
ACAGCGTCGCCAGCGCAGCTCTCTCTAGCGACGGCCGCATCTTCACTGGTGTCAATGTATATCATTTTACTGGG
GGACCTTGTGCAGAACTCGTGGTGCTGGGCACTGCTGCTGCTGCGGCAGCTGGCAACCTGACTTGTATCGTCG
CGATCGGAAATGAGAACAGGGGCATCTTGAGCCCCTGCGGACGGTGCCGACAGGTGCTTCTCGATCTGCATCC
TGGGATCAAAGCCATAGTGAAGGACAGTGATGGACAGCCGACGGCAGTTGGGATTCGTGAATTGCTGCCCTCT
GGTTATGTGTGGGAGGGCTAAGAATTCCTAGAGCTCGCTGATCAGCCTCGACTGTGCCTTCTAGTTGCCAGCCA
TCTGTTGTTTGCCCCTCCCCCGTGCCTTCCTTGACCCTGGAAGGTGCCACTCCCACTGTCCTTTCCTAATAAAAT
GAGGAAATTGCATCGCATTGTCTGAGTAGGTGTCATTCTATTCTGGGGGGTGGGGTGGGGCAGGACAGCAAGG
GGGAGGATTGGGAAGAGAATAGCAGGCATGCTGGGGAGGTACCGAGGGCCTATTTCCCATGATTCCTTCATATT
TGCATATACGATACAAGGCTGTTAGAGAGATAATTGGAATTAATTTGACTGTAAACACAAAGATATTAGTACAAAA
TACGTGACGTAGAAAGTAATAATTTCTTGGGTAGTTTGCAGTTTTAAAATTATGTTTTAAAATGGACTATCATATGC
TTACCGTAACTTGAAAGTATTTCGATTTCTTGGCTTTATATATCTTGTGGAAAGGACGAAAcaccgAAGGACACAGG
TAGGGGAACTgTTTTAGTACTCTGGAAACAGAATCTACTAAAACAAGGCAAAATGCCGTGTTTATCTCGTCAACTT
GTTGGCGAGATTTTTGCGGCCGCAGGAACCCCTAGTGATGGAGTTGGCCACTCCCTCTCTGCGCGCTCGCTCG
CTCACTGAGGCCGGGCGACCAAAGGTCGCCCGACGCCCGGGCTTTGCCCGGGCGGCCTCAGTGAGCGAGCG
AGCGCGCAGCTGCCTGCAGGGGCGCCTGATGCGGTATTTTCTCCTTACGCATCTGTGCGGTATTTCACACCGCA
TACGTCAAAGCAACCATAGTACGCGCCCTGTAGCGGCGCATTAAGCGCGGCGGGTGTGGTGGTTACGCGCAGC
GTGACCGCTACACTTGCCAGCGCCTTAGCGCCCGCTCCTTTCGCTTTCTTCCCTTCCTTTCTCGCCACGTTCGC
CGGCTTTCCCCGTCAAGCTCTAAATCGGGGGCTCCCTTTAGGGTTCCGATTTAGTGCTTTACGGCACCTCGACC
CCAAAAAACTTGATTTGGGTGATGGTTCACGTAGTGGGCCATCGCCCTGATAGACGGTTTTTCGCCCTTTGACGT
TGGAGTCCACGTTCTTTAATAGTGGACTCTTGTTCCAAACTGGAACAACACTCAACTCTATCTCGGGCTATTCTTT
TGATTTATAAGGGATTTTGCCGATTTCGGTCTATTGGTTAAAAAATGAGCTGATTTAACAAAAATTTAACGCGAATT
TTAACAAAATATTAACGTTTACAATTTTATGGTGCACTCTCAGTACAATCTGCTCTGATGCCGCATAGTTAAGCCA
GCCCCGACACCCGCCAACACCCGCTGACGCGCCCTGACGGGCTTGTCTGCTCCCGGCATCCGCTTACAGACAA
GCTGTGACCGTCTCCGGGAGCTGCATGTGTCAGAGGTTTTCACCGTCATCACCGAAACGCGCGAGACGAAAGG
GCCTCGTGATACGCCTATTTTTATAGGTTAATGTCATGATAATAATGGTTTCTTAGACGTCAGGTGGCACTTTTCG
GGGAAATGTGCGCGGAACCCCTATTTGTTTATTTTTCTAAATACATTCAAATATGTATCCGCTCATGAGACAATAA
CCCTGATAAATGCTTCAATAATATTGAAAAAGGAAGAGTATGAGTATTCAACATTTCCGTGTCGCCCTTATTCCCT
TTTTTGCGGCATTTTGCCTTCCTGTTTTTGCTCACCCAGAAACGCTGGTGAAAGTAAAAGATGCTGAAGATCAGTT
GGGTGCACGAGTGGGTTACATCGAACTGGATCTCAACAGCGGTAAGATCCTTGAGAGTTTTCGCCCCGAAGAAC
GTTTTCCAATGATGAGCACTTTTAAAGTTCTGCTATGTGGCGCGGTATTATCCCGTATTGACGCCGGGCAAGAGC
AACTCGGTCGCCGCATACACTATTCTCAGAATGACTTGGTTGAGTACTCACCAGTCACAGAAAAGCATCTTACGG
ATGGCATGACAGTAAGAGAATTATGCAGTGCTGCCATAACCATGAGTGATAACACTGCGGCCAACTTACTTCTGA
CAACGATCGGAGGACCGAAGGAGCTAACCGCTTTTTTGCACAACATGGGGGATCATGTAACTCGCCTTGATCGT
TGGGAACCGGAGCTGAATGAAGCCATACCAAACGACGAGCGTGACACCACGATGCCTGTAGCAATGGCAACAA
CGTTGCGCAAACTATTAACTGGCGAACTACTTACTCTAGCTTCCCGGCAACAATTAATAGACTGGATGGAGGCG
GATAAAGTTGCAGGACCACTTCTGCGCTCGGCCCTTCCGGCTGGCTGGTTTATTGCTGATAAATCTGGAGCCGG
TGAGCGTGGAAGCCGCGGTATCATTGCAGCACTGGGGCCAGATGGTAAGCCCTCCCGTATCGTAGTTATCTACA
CGACGGGGAGTCAGGCAACTATGGATGAACGAAATAGACAGATCGCTGAGATAGGTGCCTCACTGATTAAGCAT
TGGTAACTGTCAGACCAAGTTTACTCATATATACTTTAGATTGATTTAAAACTTCATTTTTAATTTAAAAGGATCTAG
GTGAAGATCCTTTTTGATAATCTCATGACCAAAATCCCTTAACGTGAGTTTTCGTTCCACTGAGCGTCAGACCCC
GTAGAAAAGATCAAAGGATCTTCTTGAGATCCTTTTTTTCTGCGCGTAATCTGCTGCTTGCAAACAAAAAAACCAC
CGCTACCAGCGGTGGTTTGTTTGCCGGATCAAGAGCTACCAACTCTTTTTCCGAAGGTAACTGGCTTCAGCAGA
GCGCAGATACCAAATACTGTTCTTCTAGTGTAGCCGTAGTTAGGCCACCACTTCAAGAACTCTGTAGCACCGCCT
ACATACCTCGCTCTGCTAATCCTGTTACCAGTGGCTGCTGCCAGTGGCGATAAGTCGTGTCTTACCGGGTTGGA
CTCAAGACGATAGTTACCGGATAAGGCGCAGCGGTCGGGCTGAACGGGGGGTTCGTGCACACAGCCCAGCTTG
GAGCGAACGACCTACACCGAACTGAGATACCTACAGCGTGAGCTATGAGAAAGCGCCACGCTTCCCGAAGGGA
GAAAGGCGGACAGGTATCCGGTAAGCGGCAGGGTCGGAACAGGAGAGCGCACGAGGGAGCTTCCAGGGGGA
AACGCCTGGTATCTTTATAGTCCTGTCGGGTTTCGCCACCTCTGACTTGAGCGTCGATTTTTGTGATGCTCGTCA
GGGGGGCGGAGCCTATGGAAAAACGCCAGCAACGCGGCCTTTTTACGGTTCCTGGCCTTTTGCTGGCCTTTTG
CTCACATGT
pAAV-CMV-sadCas9-U6gRNA(Npyr2-sa_sgRNA3) used in in vitro qPCR experiments (SEQ ID NO: 116)
CCTGCAGGCAGCTGCGCGCTCGCTCGCTCACTGAGGCCGCCCGGGCGTCGGGCGACCTTTGGTCGCCCGGCC
TCAGTGAGCGAGCGAGCGCGCAGAGAGGGAGTGGCCAACTCCATCACTAGGGGTTCCTGCGGCCTCTAGACTC
GAGGCGTTGACATTGATTATTGACTAGTTATTAATAGTAATCAATTACGGGGTCATTAGTTCATAGCCCATATATG
GAGTTCCGCGTTACATAACTTACGGTAAATGGCCCGCCTGGCTGACCGCCCAACGACCCCCGCCCATTGACGT
CAATAATGACGTATGTTCCCATAGTAACGCCAATAGGGACTTTCCATTGACGTCAATGGGTGGAGTATTTACGGT
AAACTGCCCACTTGGCAGTACATCAAGTGTATCATATGCCAAGTACGCCCCCTATTGACGTCAATGACGGTAAAT
GGCCCGCCTGGCATTATGCCCAGTACATGACCTTATGGGACTTTCCTACTTGGCAGTACATCTACGTATTAGTCA
TCGCTATTACCATGGTGATGCGGTTTTGGCAGTACATCAATGGGCGTGGATAGCGGTTTGACTCACGGGGATTT
CCAAGTCTCCACCCCATTGACGTCAATGGGAGTTTGTTTTGGCACCAAAATCAACGGGACTTTCCAAAATGTCGT
AACAACTCCGCCCCATTGACGCAAATGGGCGGTAGGCGTGTACGGTGGGAGGTCTATATAAGCAGAGCTCTCT
GGCTAACTACCGGTGCCACCATGGCCCCAAAGAAGAAGCGGAAGGTCGGTATCCACGGAGTCCCAGCAGCCAA
GCGGAACTACATCCTGGGCCTGGCCATCGGCATCACCAGCGTGGGCTACGGCATCATCGACTACGAGACACGG
GACGTGATCGATGCCGGCGTGCGGCTGTTCAAAGAGGCCAACGTGGAAAACAACGAGGGCAGGCGGAGCAAG
AGAGGCGCCAGAAGGCTGAAGCGGCGGAGGCGGCATAGAATCCAGAGAGTGAAGAAGCTGCTGTTCGACTAC
AACCTGCTGACCGACCACAGCGAGCTGAGCGGCATCAACCCCTACGAGGCCAGAGTGAAGGGCCTGAGCCAG
AAGCTGAGCGAGGAAGAGTTCTCTGCCGCCCTGCTGCACCTGGCCAAGAGAAGAGGCGTGCACAACGTGAACG
AGGTGGAAGAGGACACCGGCAACGAGCTGTCCACCAAAGAGCAGATCAGCCGGAACAGCAAGGCCCTGGAAG
AGAAATACGTGGCCGAACTGCAGCTGGAACGGCTGAAGAAAGACGGCGAAGTGCGGGGCAGCATCAACAGATT
CAAGACCAGCGACTACGTGAAAGAAGCCAAACAGCTGCTGAAGGTGCAGAAGGCCTACCACCAGCTGGACCAG
AGCTTCATCGACACCTACATCGACCTGCTGGAAACCCGGCGGACCTACTATGAGGGACCTGGCGAGGGCAGCC
CCTTCGGCTGGAAGGACATCAAAGAATGGTACGAGATGCTGATGGGCCACTGCACCTACTTCCCCGAGGAACT
GCGGAGCGTGAAGTACGCCTACAACGCCGACCTGTACAACGCCCTGAACGACCTGAACAATCTCGTGATCACC
AGGGACGAGAACGAGAAGCTGGAATATTACGAGAAGTTCCAGATCATCGAGAACGTGTTCAAGCAGAAGAAGAA
GCCCACCCTGAAGCAGATCGCCAAAGAAATCCTCGTGAACGAAGAGGATATTAAGGGCTACAGAGTGACCAGCA
CCGGCAAGCCCGAGTTCACCAACCTGAAGGTGTACCACGACATCAAGGACATTACCGCCCGGAAAGAGATTATT
GAGAACGCCGAGCTGCTGGATCAGATTGCCAAGATCCTGACCATCTACCAGAGCAGCGAGGACATCCAGGAAG
AACTGACCAATCTGAACTCCGAGCTGACCCAGGAAGAGATCGAGCAGATCTCTAATCTGAAGGGCTATACCGGC
ACCCACAACCTGAGCCTGAAGGCCATCAACCTGATCCTGGACGAGCTGTGGCACACCAACGACAACCAGATCG
CTATCTTCAACCGGCTGAAGCTGGTGCCCAAGAAGGTGGACCTGTCCCAGCAGAAAGAGATCCCCACCACCCT
GGTGGACGACTTCATCCTGAGCCCCGTCGTGAAGAGAAGCTTCATCCAGAGCATCAAAGTGATCAACGCCATCA
TCAAGAAGTACGGCCTGCCCAACGACATCATTATCGAGCTGGCCCGCGAGAAGAACTCCAAGGACGCCCAGAA
AATGATCAACGAGATGCAGAAGCGGAACCGGCAGACCAACGAGCGGATCGAGGAAATCATCCGGACCACCGGC
AAAGAGAACGCCAAGTACCTGATCGAGAAGATCAAGCTGCACGACATGCAGGAAGGCAAGTGCCTGTACAGCC
TGGAAGCCATCCCTCTGGAAGATCTGCTGAACAACCCCTTCAACTATGAGGTGGACCACATCATCCCCAGAAGC
GTGTCCTTCGACAACAGCTTCAACAACAAGGTGCTCGTGAAGCAGGAAGAAGCCAGCAAGAAGGGCAACCGGA
CCCCATTCCAGTACCTGAGCAGCAGCGACAGCAAGATCAGCTACGAAACCTTCAAGAAGCACATCCTGAATCTG
GCCAAGGGCAAGGGCAGAATCAGCAAGACCAAGAAAGAGTATCTGCTGGAAGAACGGGACATCAACAGGTTCT
CCGTGCAGAAAGACTTCATCAACCGGAACCTGGTGGATACCAGATACGCCACCAGAGGCCTGATGAACCTGCT
GCGGAGCTACTTCAGAGTGAACAACCTGGACGTGAAAGTGAAGTCCATCAATGGCGGCTTCACCAGCTTTCTGC
GGCGGAAGTGGAAGTTTAAGAAAGAGCGGAACAAGGGGTACAAGCACCACGCCGAGGACGCCCTGATCATTGC
CAACGCCGATTTCATCTTCAAAGAGTGGAAGAAACTGGACAAGGCCAAAAAAGTGATGGAAAACCAGATGTTCG
AGGAAAAGCAGGCCGAGAGCATGCCCGAGATCGAAACCGAGCAGGAGTACAAAGAGATCTTCATCACCCCCCA
CCAGATCAAGCACATTAAGGACTTCAAGGACTACAAGTACAGCCACCGGGTGGACAAGAAGCCTAATAGAGAGC
TGATTAACGACACCCTGTACTCCACCCGGAAGGACGACAAGGGCAACACCCTGATCGTGAACAATCTGAACGGC
CTGTACGACAAGGACAATGACAAGCTGAAAAAGCTGATCAACAAGAGCCCCGAAAAGCTGCTGATGTACCACCA
CGACCCCCAGACCTACCAGAAACTGAAGCTGATTATGGAACAGTACGGCGACGAGAAGAATCCCCTGTACAAGT
ACTACGAGGAAACCGGGAACTACCTGACCAAGTACTCCAAAAAGGACAACGGCCCCGTGATCAAGAAGATTAAG
TATTACGGCAACAAACTGAACGCCCATCTGGACATCACCGACGACTACCCCAACAGCAGAAACAAGGTCGTGAA
GCTGTCCCTGAAGCCCTACAGATTCGACGTGTACCTGGACAATGGCGTGTACAAGTTCGTGACCGTGAAGAATC
TGGATGTGATCAAAAAAGAAAACTACTACGAAGTGAATAGCAAGTGCTATGAGGAAGCTAAGAAGCTGAAGAAGA
TCAGCAACCAGGCCGAGTTTATCGCCTCCTTCTACAACAACGATCTGATCAAGATCAACGGCGAGCTGTATAGA
GTGATCGGCGTGAACAACGACCTGCTGAACCGGATCGAAGTGAACATGATCGACATCACCTACCGCGAGTACCT
GGAAAACATGAACGACAAGAGGCCCCCCAGGATCATTAAGACAATCGCCTCCAAGACCCAGAGCATTAAGAAGT
ACAGCACAGACATTCTGGGCAACCTGTATGAAGTGAAATCTAAGAAGCACCCTCAGATCATCAAAAAGGGCAAAA
GGCCGGCGGCCACGAAAAAGGCCGGCCAGGCAAAAAAGAAAAAGGGATCCGGACGGGCTGACGCATTGGACG
ATTTTGATCTGGATATGCTGGGAAGTGACGCCCTCGATGATTTTGACCTTGACATGCTTGGTTCGGATGCCCTTG
ATGACTTTGACCTCGACATGCTCGGCAGTGACGCCCTTGATGATTTCGACCTGGACATGCTGATTAACTGTACAG
GCAGTGGAGAGGGCAGAGGAAGTCTGCTAACATGCGGTGACGTCGAGGAGAATCCTGGCCCAATGGCCAAGC
CTTTGTCTCAAGAAGAATCCACCCTCATTGAAAGAGCAACGGCTACAATCAACAGCATCCCCATCTCTGAAGACT
ACAGCGTCGCCAGCGCAGCTCTCTCTAGCGACGGCCGCATCTTCACTGGTGTCAATGTATATCATTTTACTGGG
GGACCTTGTGCAGAACTCGTGGTGCTGGGCACTGCTGCTGCTGCGGCAGCTGGCAACCTGACTTGTATCGTCG
CGATCGGAAATGAGAACAGGGGCATCTTGAGCCCCTGCGGACGGTGCCGACAGGTGCTTCTCGATCTGCATCC
TGGGATCAAAGCCATAGTGAAGGACAGTGATGGACAGCCGACGGCAGTTGGGATTCGTGAATTGCTGCCCTCT
GGTTATGTGTGGGAGGGCTAAGAATTCCTAGAGCTCGCTGATCAGCCTCGACTGTGCCTTCTAGTTGCCAGCCA
TCTGTTGTTTGCCCCTCCCCCGTGCCTTCCTTGACCCTGGAAGGTGCCACTCCCACTGTCCTTTCCTAATAAAAT
GAGGAAATTGCATCGCATTGTCTGAGTAGGTGTCATTCTATTCTGGGGGGTGGGGTGGGGCAGGACAGCAAGG
GGGAGGATTGGGAAGAGAATAGCAGGCATGCTGGGGAGGTACCGAGGGCCTATTTCCCATGATTCCTTCATATT
TGCATATACGATACAAGGCTGTTAGAGAGATAATTGGAATTAATTTGACTGTAAACACAAAGATATTAGTACAAAA
TACGTGACGTAGAAAGTAATAATTTCTTGGGTAGTTTGCAGTTTTAAAATTATGTTTTAAAATGGACTATCATATGC
TTACCGTAACTTGAAAGTATTTCGATTTCTTGGCTTTATATATCTTGTGGAAAGGACGAAAcaccGGAGGAGGATC
GGAGATAGAAgTTTTAGTACTCTGGAAACAGAATCTACTAAAACAAGGCAAAATGCCGTGTTTATCTCGTCAACTT
GTTGGCGAGATTTTTGCGGCCGCAGGAACCCCTAGTGATGGAGTTGGCCACTCCCTCTCTGCGCGCTCGCTCG
CTCACTGAGGCCGGGCGACCAAAGGTCGCCCGACGCCCGGGCTTTGCCCGGGCGGCCTCAGTGAGCGAGCG
AGCGCGCAGCTGCCTGCAGGGGCGCCTGATGCGGTATTTTCTCCTTACGCATCTGTGCGGTATTTCACACCGCA
TACGTCAAAGCAACCATAGTACGCGCCCTGTAGCGGCGCATTAAGCGCGGCGGGTGTGGTGGTTACGCGCAGC
GTGACCGCTACACTTGCCAGCGCCTTAGCGCCCGCTCCTTTCGCTTTCTTCCCTTCCTTTCTCGCCACGTTCGC
CGGCTTTCCCCGTCAAGCTCTAAATCGGGGGCTCCCTTTAGGGTTCCGATTTAGTGCTTTACGGCACCTCGACC
CCAAAAAACTTGATTTGGGTGATGGTTCACGTAGTGGGCCATCGCCCTGATAGACGGTTTTTCGCCCTTTGACGT
TGGAGTCCACGTTCTTTAATAGTGGACTCTTGTTCCAAACTGGAACAACACTCAACTCTATCTCGGGCTATTCTTT
TGATTTATAAGGGATTTTGCCGATTTCGGTCTATTGGTTAAAAAATGAGCTGATTTAACAAAAATTTAACGCGAATT
TTAACAAAATATTAACGTTTACAATTTTATGGTGCACTCTCAGTACAATCTGCTCTGATGCCGCATAGTTAAGCCA
GCCCCGACACCCGCCAACACCCGCTGACGCGCCCTGACGGGCTTGTCTGCTCCCGGCATCCGCTTACAGACAA
GCTGTGACCGTCTCCGGGAGCTGCATGTGTCAGAGGTTTTCACCGTCATCACCGAAACGCGCGAGACGAAAGG
GCCTCGTGATACGCCTATTTTTATAGGTTAATGTCATGATAATAATGGTTTCTTAGACGTCAGGTGGCACTTTTCG
GGGAAATGTGCGCGGAACCCCTATTTGTTTATTTTTCTAAATACATTCAAATATGTATCCGCTCATGAGACAATAA
CCCTGATAAATGCTTCAATAATATTGAAAAAGGAAGAGTATGAGTATTCAACATTTCCGTGTCGCCCTTATTCCCT
TTTTTGCGGCATTTTGCCTTCCTGTTTTTGCTCACCCAGAAACGCTGGTGAAAGTAAAAGATGCTGAAGATCAGTT
GGGTGCACGAGTGGGTTACATCGAACTGGATCTCAACAGCGGTAAGATCCTTGAGAGTTTTCGCCCCGAAGAAC
GTTTTCCAATGATGAGCACTTTTAAAGTTCTGCTATGTGGCGCGGTATTATCCCGTATTGACGCCGGGCAAGAGC
AACTCGGTCGCCGCATACACTATTCTCAGAATGACTTGGTTGAGTACTCACCAGTCACAGAAAAGCATCTTACGG
ATGGCATGACAGTAAGAGAATTATGCAGTGCTGCCATAACCATGAGTGATAACACTGCGGCCAACTTACTTCTGA
CAACGATCGGAGGACCGAAGGAGCTAACCGCTTTTTTGCACAACATGGGGGATCATGTAACTCGCCTTGATCGT
TGGGAACCGGAGCTGAATGAAGCCATACCAAACGACGAGCGTGACACCACGATGCCTGTAGCAATGGCAACAA
CGTTGCGCAAACTATTAACTGGCGAACTACTTACTCTAGCTTCCCGGCAACAATTAATAGACTGGATGGAGGCG
GATAAAGTTGCAGGACCACTTCTGCGCTCGGCCCTTCCGGCTGGCTGGTTTATTGCTGATAAATCTGGAGCCGG
TGAGCGTGGAAGCCGCGGTATCATTGCAGCACTGGGGCCAGATGGTAAGCCCTCCCGTATCGTAGTTATCTACA
CGACGGGGAGTCAGGCAACTATGGATGAACGAAATAGACAGATCGCTGAGATAGGTGCCTCACTGATTAAGCAT
TGGTAACTGTCAGACCAAGTTTACTCATATATACTTTAGATTGATTTAAAACTTCATTTTTAATTTAAAAGGATCTAG
GTGAAGATCCTTTTTGATAATCTCATGACCAAAATCCCTTAACGTGAGTTTTCGTTCCACTGAGCGTCAGACCCC
GTAGAAAAGATCAAAGGATCTTCTTGAGATCCTTTTTTTCTGCGCGTAATCTGCTGCTTGCAAACAAAAAAACCAC
CGCTACCAGCGGTGGTTTGTTTGCCGGATCAAGAGCTACCAACTCTTTTTCCGAAGGTAACTGGCTTCAGCAGA
GCGCAGATACCAAATACTGTTCTTCTAGTGTAGCCGTAGTTAGGCCACCACTTCAAGAACTCTGTAGCACCGCCT
ACATACCTCGCTCTGCTAATCCTGTTACCAGTGGCTGCTGCCAGTGGCGATAAGTCGTGTCTTACCGGGTTGGA
CTCAAGACGATAGTTACCGGATAAGGCGCAGCGGTCGGGCTGAACGGGGGGTTCGTGCACACAGCCCAGCTTG
GAGCGAACGACCTACACCGAACTGAGATACCTACAGCGTGAGCTATGAGAAAGCGCCACGCTTCCCGAAGGGA
GAAAGGCGGACAGGTATCCGGTAAGCGGCAGGGTCGGAACAGGAGAGCGCACGAGGGAGCTTCCAGGGGGA
AACGCCTGGTATCTTTATAGTCCTGTCGGGTTTCGCCACCTCTGACTTGAGCGTCGATTTTTGTGATGCTCGTCA
GGGGGGCGGAGCCTATGGAAAAACGCCAGCAACGCGGCCTTTTTACGGTTCCTGGCCTTTTGCTGGCCTTTTG
CTCACATGT
1.11 KCNJ2
Nucleotide sequence of sasgRNA for mouse KCNJ2; sgRNA1 (SEQ ID NO: 117)
TCCTCCTCCTGATGGCGGTTC
Nucleotide sequence of sasgRNA for mouse KCNJ2; sgRNA2 (SEQ ID NO: 118)
GCCCCGGGAACCGCCATCAGG
Nucleotide sequence of sasgRNA for mouse KCNJ2; sgRNA3 (SEQ ID NO: 119)
CAGAGCCAGGGTCCGCGGGTG
pAAV-CMV-sadCas9-U6gRNA(Kcnj2-sa_sgRNA1) used in in vitro qPCR experiments (SEQ ID NO: 120)
CCTGCAGGCAGCTGCGCGCTCGCTCGCTCACTGAGGCCGCCCGGGCGTCGGGCGACCTTTGGTCGCCCGGCC
TCAGTGAGCGAGCGAGCGCGCAGAGAGGGAGTGGCCAACTCCATCACTAGGGGTTCCTGCGGCCTCTAGACTC
GAGGCGTTGACATTGATTATTGACTAGTTATTAATAGTAATCAATTACGGGGTCATTAGTTCATAGCCCATATATG
GAGTTCCGCGTTACATAACTTACGGTAAATGGCCCGCCTGGCTGACCGCCCAACGACCCCCGCCCATTGACGT
CAATAATGACGTATGTTCCCATAGTAACGCCAATAGGGACTTTCCATTGACGTCAATGGGTGGAGTATTTACGGT
AAACTGCCCACTTGGCAGTACATCAAGTGTATCATATGCCAAGTACGCCCCCTATTGACGTCAATGACGGTAAAT
GGCCCGCCTGGCATTATGCCCAGTACATGACCTTATGGGACTTTCCTACTTGGCAGTACATCTACGTATTAGTCA
TCGCTATTACCATGGTGATGCGGTTTTGGCAGTACATCAATGGGCGTGGATAGCGGTTTGACTCACGGGGATTT
CCAAGTCTCCACCCCATTGACGTCAATGGGAGTTTGTTTTGGCACCAAAATCAACGGGACTTTCCAAAATGTCGT
AACAACTCCGCCCCATTGACGCAAATGGGCGGTAGGCGTGTACGGTGGGAGGTCTATATAAGCAGAGCTCTCT
GGCTAACTACCGGTGCCACCATGGCCCCAAAGAAGAAGCGGAAGGTCGGTATCCACGGAGTCCCAGCAGCCAA
GCGGAACTACATCCTGGGCCTGGCCATCGGCATCACCAGCGTGGGCTACGGCATCATCGACTACGAGACACGG
GACGTGATCGATGCCGGCGTGCGGCTGTTCAAAGAGGCCAACGTGGAAAACAACGAGGGCAGGCGGAGCAAG
AGAGGCGCCAGAAGGCTGAAGCGGCGGAGGCGGCATAGAATCCAGAGAGTGAAGAAGCTGCTGTTCGACTAC
AACCTGCTGACCGACCACAGCGAGCTGAGCGGCATCAACCCCTACGAGGCCAGAGTGAAGGGCCTGAGCCAG
AAGCTGAGCGAGGAAGAGTTCTCTGCCGCCCTGCTGCACCTGGCCAAGAGAAGAGGCGTGCACAACGTGAACG
AGGTGGAAGAGGACACCGGCAACGAGCTGTCCACCAAAGAGCAGATCAGCCGGAACAGCAAGGCCCTGGAAG
AGAAATACGTGGCCGAACTGCAGCTGGAACGGCTGAAGAAAGACGGCGAAGTGCGGGGCAGCATCAACAGATT
CAAGACCAGCGACTACGTGAAAGAAGCCAAACAGCTGCTGAAGGTGCAGAAGGCCTACCACCAGCTGGACCAG
AGCTTCATCGACACCTACATCGACCTGCTGGAAACCCGGCGGACCTACTATGAGGGACCTGGCGAGGGCAGCC
CCTTCGGCTGGAAGGACATCAAAGAATGGTACGAGATGCTGATGGGCCACTGCACCTACTTCCCCGAGGAACT
GCGGAGCGTGAAGTACGCCTACAACGCCGACCTGTACAACGCCCTGAACGACCTGAACAATCTCGTGATCACC
AGGGACGAGAACGAGAAGCTGGAATATTACGAGAAGTTCCAGATCATCGAGAACGTGTTCAAGCAGAAGAAGAA
GCCCACCCTGAAGCAGATCGCCAAAGAAATCCTCGTGAACGAAGAGGATATTAAGGGCTACAGAGTGACCAGCA
CCGGCAAGCCCGAGTTCACCAACCTGAAGGTGTACCACGACATCAAGGACATTACCGCCCGGAAAGAGATTATT
GAGAACGCCGAGCTGCTGGATCAGATTGCCAAGATCCTGACCATCTACCAGAGCAGCGAGGACATCCAGGAAG
AACTGACCAATCTGAACTCCGAGCTGACCCAGGAAGAGATCGAGCAGATCTCTAATCTGAAGGGCTATACCGGC
ACCCACAACCTGAGCCTGAAGGCCATCAACCTGATCCTGGACGAGCTGTGGCACACCAACGACAACCAGATCG
CTATCTTCAACCGGCTGAAGCTGGTGCCCAAGAAGGTGGACCTGTCCCAGCAGAAAGAGATCCCCACCACCCT
GGTGGACGACTTCATCCTGAGCCCCGTCGTGAAGAGAAGCTTCATCCAGAGCATCAAAGTGATCAACGCCATCA
TCAAGAAGTACGGCCTGCCCAACGACATCATTATCGAGCTGGCCCGCGAGAAGAACTCCAAGGACGCCCAGAA
AATGATCAACGAGATGCAGAAGCGGAACCGGCAGACCAACGAGCGGATCGAGGAAATCATCCGGACCACCGGC
AAAGAGAACGCCAAGTACCTGATCGAGAAGATCAAGCTGCACGACATGCAGGAAGGCAAGTGCCTGTACAGCC
TGGAAGCCATCCCTCTGGAAGATCTGCTGAACAACCCCTTCAACTATGAGGTGGACCACATCATCCCCAGAAGC
GTGTCCTTCGACAACAGCTTCAACAACAAGGTGCTCGTGAAGCAGGAAGAAGCCAGCAAGAAGGGCAACCGGA
CCCCATTCCAGTACCTGAGCAGCAGCGACAGCAAGATCAGCTACGAAACCTTCAAGAAGCACATCCTGAATCTG
GCCAAGGGCAAGGGCAGAATCAGCAAGACCAAGAAAGAGTATCTGCTGGAAGAACGGGACATCAACAGGTTCT
CCGTGCAGAAAGACTTCATCAACCGGAACCTGGTGGATACCAGATACGCCACCAGAGGCCTGATGAACCTGCT
GCGGAGCTACTTCAGAGTGAACAACCTGGACGTGAAAGTGAAGTCCATCAATGGCGGCTTCACCAGCTTTCTGC
GGCGGAAGTGGAAGTTTAAGAAAGAGCGGAACAAGGGGTACAAGCACCACGCCGAGGACGCCCTGATCATTGC
CAACGCCGATTTCATCTTCAAAGAGTGGAAGAAACTGGACAAGGCCAAAAAAGTGATGGAAAACCAGATGTTCG
AGGAAAAGCAGGCCGAGAGCATGCCCGAGATCGAAACCGAGCAGGAGTACAAAGAGATCTTCATCACCCCCCA
CCAGATCAAGCACATTAAGGACTTCAAGGACTACAAGTACAGCCACCGGGTGGACAAGAAGCCTAATAGAGAGC
TGATTAACGACACCCTGTACTCCACCCGGAAGGACGACAAGGGCAACACCCTGATCGTGAACAATCTGAACGGC
CTGTACGACAAGGACAATGACAAGCTGAAAAAGCTGATCAACAAGAGCCCCGAAAAGCTGCTGATGTACCACCA
CGACCCCCAGACCTACCAGAAACTGAAGCTGATTATGGAACAGTACGGCGACGAGAAGAATCCCCTGTACAAGT
ACTACGAGGAAACCGGGAACTACCTGACCAAGTACTCCAAAAAGGACAACGGCCCCGTGATCAAGAAGATTAAG
TATTACGGCAACAAACTGAACGCCCATCTGGACATCACCGACGACTACCCCAACAGCAGAAACAAGGTCGTGAA
GCTGTCCCTGAAGCCCTACAGATTCGACGTGTACCTGGACAATGGCGTGTACAAGTTCGTGACCGTGAAGAATC
TGGATGTGATCAAAAAAGAAAACTACTACGAAGTGAATAGCAAGTGCTATGAGGAAGCTAAGAAGCTGAAGAAGA
TCAGCAACCAGGCCGAGTTTATCGCCTCCTTCTACAACAACGATCTGATCAAGATCAACGGCGAGCTGTATAGA
GTGATCGGCGTGAACAACGACCTGCTGAACCGGATCGAAGTGAACATGATCGACATCACCTACCGCGAGTACCT
GGAAAACATGAACGACAAGAGGCCCCCCAGGATCATTAAGACAATCGCCTCCAAGACCCAGAGCATTAAGAAGT
ACAGCACAGACATTCTGGGCAACCTGTATGAAGTGAAATCTAAGAAGCACCCTCAGATCATCAAAAAGGGCAAAA
GGCCGGCGGCCACGAAAAAGGCCGGCCAGGCAAAAAAGAAAAAGGGATCCGGACGGGCTGACGCATTGGACG
ATTTTGATCTGGATATGCTGGGAAGTGACGCCCTCGATGATTTTGACCTTGACATGCTTGGTTCGGATGCCCTTG
ATGACTTTGACCTCGACATGCTCGGCAGTGACGCCCTTGATGATTTCGACCTGGACATGCTGATTAACTGTACAG
GCAGTGGAGAGGGCAGAGGAAGTCTGCTAACATGCGGTGACGTCGAGGAGAATCCTGGCCCAATGGCCAAGC
CTTTGTCTCAAGAAGAATCCACCCTCATTGAAAGAGCAACGGCTACAATCAACAGCATCCCCATCTCTGAAGACT
ACAGCGTCGCCAGCGCAGCTCTCTCTAGCGACGGCCGCATCTTCACTGGTGTCAATGTATATCATTTTACTGGG
GGACCTTGTGCAGAACTCGTGGTGCTGGGCACTGCTGCTGCTGCGGCAGCTGGCAACCTGACTTGTATCGTCG
CGATCGGAAATGAGAACAGGGGCATCTTGAGCCCCTGCGGACGGTGCCGACAGGTGCTTCTCGATCTGCATCC
TGGGATCAAAGCCATAGTGAAGGACAGTGATGGACAGCCGACGGCAGTTGGGATTCGTGAATTGCTGCCCTCT
GGTTATGTGTGGGAGGGCTAAGAATTCCTAGAGCTCGCTGATCAGCCTCGACTGTGCCTTCTAGTTGCCAGCCA
TCTGTTGTTTGCCCCTCCCCCGTGCCTTCCTTGACCCTGGAAGGTGCCACTCCCACTGTCCTTTCCTAATAAAAT
GAGGAAATTGCATCGCATTGTCTGAGTAGGTGTCATTCTATTCTGGGGGGTGGGGTGGGGCAGGACAGCAAGG
GGGAGGATTGGGAAGAGAATAGCAGGCATGCTGGGGAGGTACCGAGGGCCTATTTCCCATGATTCCTTCATATT
TGCATATACGATACAAGGCTGTTAGAGAGATAATTGGAATTAATTTGACTGTAAACACAAAGATATTAGTACAAAA
TACGTGACGTAGAAAGTAATAATTTCTTGGGTAGTTTGCAGTTTTAAAATTATGTTTTAAAATGGACTATCATATGC
TTACCGTAACTTGAAAGTATTTCGATTTCTTGGCTTTATATATCTTGTGGAAAGGACGAAAcaccTCCTCCTCCTGA
TGGCGGTTCgTTTTAGTACTCTGGAAACAGAATCTACTAAAACAAGGCAAAATGCCGTGTTTATCTCGTCAACTTG
TTGGCGAGATTTTTGCGGCCGCAGGAACCCCTAGTGATGGAGTTGGCCACTCCCTCTCTGCGCGCTCGCTCGC
TCACTGAGGCCGGGCGACCAAAGGTCGCCCGACGCCCGGGCTTTGCCCGGGCGGCCTCAGTGAGCGAGCGA
GCGCGCAGCTGCCTGCAGGGGCGCCTGATGCGGTATTTTCTCCTTACGCATCTGTGCGGTATTTCACACCGCAT
ACGTCAAAGCAACCATAGTACGCGCCCTGTAGCGGCGCATTAAGCGCGGCGGGTGTGGTGGTTACGCGCAGC
GTGACCGCTACACTTGCCAGCGCCTTAGCGCCCGCTCCTTTCGCTTTCTTCCCTTCCTTTCTCGCCACGTTCGC
CGGCTTTCCCCGTCAAGCTCTAAATCGGGGGCTCCCTTTAGGGTTCCGATTTAGTGCTTTACGGCACCTCGACC
CCAAAAAACTTGATTTGGGTGATGGTTCACGTAGTGGGCCATCGCCCTGATAGACGGTTTTTCGCCCTTTGACGT
TGGAGTCCACGTTCTTTAATAGTGGACTCTTGTTCCAAACTGGAACAACACTCAACTCTATCTCGGGCTATTCTTT
TGATTTATAAGGGATTTTGCCGATTTCGGTCTATTGGTTAAAAAATGAGCTGATTTAACAAAAATTTAACGCGAATT
TTAACAAAATATTAACGTTTACAATTTTATGGTGCACTCTCAGTACAATCTGCTCTGATGCCGCATAGTTAAGCCA
GCCCCGACACCCGCCAACACCCGCTGACGCGCCCTGACGGGCTTGTCTGCTCCCGGCATCCGCTTACAGACAA
GCTGTGACCGTCTCCGGGAGCTGCATGTGTCAGAGGTTTTCACCGTCATCACCGAAACGCGCGAGACGAAAGG
GCCTCGTGATACGCCTATTTTTATAGGTTAATGTCATGATAATAATGGTTTCTTAGACGTCAGGTGGCACTTTTCG
GGGAAATGTGCGCGGAACCCCTATTTGTTTATTTTTCTAAATACATTCAAATATGTATCCGCTCATGAGACAATAA
CCCTGATAAATGCTTCAATAATATTGAAAAAGGAAGAGTATGAGTATTCAACATTTCCGTGTCGCCCTTATTCCCT
TTTTTGCGGCATTTTGCCTTCCTGTTTTTGCTCACCCAGAAACGCTGGTGAAAGTAAAAGATGCTGAAGATCAGTT
GGGTGCACGAGTGGGTTACATCGAACTGGATCTCAACAGCGGTAAGATCCTTGAGAGTTTTCGCCCCGAAGAAC
GTTTTCCAATGATGAGCACTTTTAAAGTTCTGCTATGTGGCGCGGTATTATCCCGTATTGACGCCGGGCAAGAGC
AACTCGGTCGCCGCATACACTATTCTCAGAATGACTTGGTTGAGTACTCACCAGTCACAGAAAAGCATCTTACGG
ATGGCATGACAGTAAGAGAATTATGCAGTGCTGCCATAACCATGAGTGATAACACTGCGGCCAACTTACTTCTGA
CAACGATCGGAGGACCGAAGGAGCTAACCGCTTTTTTGCACAACATGGGGGATCATGTAACTCGCCTTGATCGT
TGGGAACCGGAGCTGAATGAAGCCATACCAAACGACGAGCGTGACACCACGATGCCTGTAGCAATGGCAACAA
CGTTGCGCAAACTATTAACTGGCGAACTACTTACTCTAGCTTCCCGGCAACAATTAATAGACTGGATGGAGGCG
GATAAAGTTGCAGGACCACTTCTGCGCTCGGCCCTTCCGGCTGGCTGGTTTATTGCTGATAAATCTGGAGCCGG
TGAGCGTGGAAGCCGCGGTATCATTGCAGCACTGGGGCCAGATGGTAAGCCCTCCCGTATCGTAGTTATCTACA
CGACGGGGAGTCAGGCAACTATGGATGAACGAAATAGACAGATCGCTGAGATAGGTGCCTCACTGATTAAGCAT
TGGTAACTGTCAGACCAAGTTTACTCATATATACTTTAGATTGATTTAAAACTTCATTTTTAATTTAAAAGGATCTAG
GTGAAGATCCTTTTTGATAATCTCATGACCAAAATCCCTTAACGTGAGTTTTCGTTCCACTGAGCGTCAGACCCC
GTAGAAAAGATCAAAGGATCTTCTTGAGATCCTTTTTTTCTGCGCGTAATCTGCTGCTTGCAAACAAAAAAACCAC
CGCTACCAGCGGTGGTTTGTTTGCCGGATCAAGAGCTACCAACTCTTTTTCCGAAGGTAACTGGCTTCAGCAGA
GCGCAGATACCAAATACTGTTCTTCTAGTGTAGCCGTAGTTAGGCCACCACTTCAAGAACTCTGTAGCACCGCCT
ACATACCTCGCTCTGCTAATCCTGTTACCAGTGGCTGCTGCCAGTGGCGATAAGTCGTGTCTTACCGGGTTGGA
CTCAAGACGATAGTTACCGGATAAGGCGCAGCGGTCGGGCTGAACGGGGGGTTCGTGCACACAGCCCAGCTTG
GAGCGAACGACCTACACCGAACTGAGATACCTACAGCGTGAGCTATGAGAAAGCGCCACGCTTCCCGAAGGGA
GAAAGGCGGACAGGTATCCGGTAAGCGGCAGGGTCGGAACAGGAGAGCGCACGAGGGAGCTTCCAGGGGGA
AACGCCTGGTATCTTTATAGTCCTGTCGGGTTTCGCCACCTCTGACTTGAGCGTCGATTTTTGTGATGCTCGTCA
GGGGGGCGGAGCCTATGGAAAAACGCCAGCAACGCGGCCTTTTTACGGTTCCTGGCCTTTTGCTGGCCTTTTG
CTCACATGT
pAAV-CMV-sadCas9-U6gRNA(Kcnj2-sa_sgRNA2) used in in vitro qPCR experiments (SEQ ID NO: 121)
CCTGCAGGCAGCTGCGCGCTCGCTCGCTCACTGAGGCCGCCCGGGCGTCGGGCGACCTTTGGTCGCCCGGCC
TCAGTGAGCGAGCGAGCGCGCAGAGAGGGAGTGGCCAACTCCATCACTAGGGGTTCCTGCGGCCTCTAGACTC
GAGGCGTTGACATTGATTATTGACTAGTTATTAATAGTAATCAATTACGGGGTCATTAGTTCATAGCCCATATATG
GAGTTCCGCGTTACATAACTTACGGTAAATGGCCCGCCTGGCTGACCGCCCAACGACCCCCGCCCATTGACGT
CAATAATGACGTATGTTCCCATAGTAACGCCAATAGGGACTTTCCATTGACGTCAATGGGTGGAGTATTTACGGT
AAACTGCCCACTTGGCAGTACATCAAGTGTATCATATGCCAAGTACGCCCCCTATTGACGTCAATGACGGTAAAT
GGCCCGCCTGGCATTATGCCCAGTACATGACCTTATGGGACTTTCCTACTTGGCAGTACATCTACGTATTAGTCA
TCGCTATTACCATGGTGATGCGGTTTTGGCAGTACATCAATGGGCGTGGATAGCGGTTTGACTCACGGGGATTT
CCAAGTCTCCACCCCATTGACGTCAATGGGAGTTTGTTTTGGCACCAAAATCAACGGGACTTTCCAAAATGTCGT
AACAACTCCGCCCCATTGACGCAAATGGGCGGTAGGCGTGTACGGTGGGAGGTCTATATAAGCAGAGCTCTCT
GGCTAACTACCGGTGCCACCATGGCCCCAAAGAAGAAGCGGAAGGTCGGTATCCACGGAGTCCCAGCAGCCAA
GCGGAACTACATCCTGGGCCTGGCCATCGGCATCACCAGCGTGGGCTACGGCATCATCGACTACGAGACACGG
GACGTGATCGATGCCGGCGTGCGGCTGTTCAAAGAGGCCAACGTGGAAAACAACGAGGGCAGGCGGAGCAAG
AGAGGCGCCAGAAGGCTGAAGCGGCGGAGGCGGCATAGAATCCAGAGAGTGAAGAAGCTGCTGTTCGACTAC
AACCTGCTGACCGACCACAGCGAGCTGAGCGGCATCAACCCCTACGAGGCCAGAGTGAAGGGCCTGAGCCAG
AAGCTGAGCGAGGAAGAGTTCTCTGCCGCCCTGCTGCACCTGGCCAAGAGAAGAGGCGTGCACAACGTGAACG
AGGTGGAAGAGGACACCGGCAACGAGCTGTCCACCAAAGAGCAGATCAGCCGGAACAGCAAGGCCCTGGAAG
AGAAATACGTGGCCGAACTGCAGCTGGAACGGCTGAAGAAAGACGGCGAAGTGCGGGGCAGCATCAACAGATT
CAAGACCAGCGACTACGTGAAAGAAGCCAAACAGCTGCTGAAGGTGCAGAAGGCCTACCACCAGCTGGACCAG
AGCTTCATCGACACCTACATCGACCTGCTGGAAACCCGGCGGACCTACTATGAGGGACCTGGCGAGGGCAGCC
CCTTCGGCTGGAAGGACATCAAAGAATGGTACGAGATGCTGATGGGCCACTGCACCTACTTCCCCGAGGAACT
GCGGAGCGTGAAGTACGCCTACAACGCCGACCTGTACAACGCCCTGAACGACCTGAACAATCTCGTGATCACC
AGGGACGAGAACGAGAAGCTGGAATATTACGAGAAGTTCCAGATCATCGAGAACGTGTTCAAGCAGAAGAAGAA
GCCCACCCTGAAGCAGATCGCCAAAGAAATCCTCGTGAACGAAGAGGATATTAAGGGCTACAGAGTGACCAGCA
CCGGCAAGCCCGAGTTCACCAACCTGAAGGTGTACCACGACATCAAGGACATTACCGCCCGGAAAGAGATTATT
GAGAACGCCGAGCTGCTGGATCAGATTGCCAAGATCCTGACCATCTACCAGAGCAGCGAGGACATCCAGGAAG
AACTGACCAATCTGAACTCCGAGCTGACCCAGGAAGAGATCGAGCAGATCTCTAATCTGAAGGGCTATACCGGC
ACCCACAACCTGAGCCTGAAGGCCATCAACCTGATCCTGGACGAGCTGTGGCACACCAACGACAACCAGATCG
CTATCTTCAACCGGCTGAAGCTGGTGCCCAAGAAGGTGGACCTGTCCCAGCAGAAAGAGATCCCCACCACCCT
GGTGGACGACTTCATCCTGAGCCCCGTCGTGAAGAGAAGCTTCATCCAGAGCATCAAAGTGATCAACGCCATCA
TCAAGAAGTACGGCCTGCCCAACGACATCATTATCGAGCTGGCCCGCGAGAAGAACTCCAAGGACGCCCAGAA
AATGATCAACGAGATGCAGAAGCGGAACCGGCAGACCAACGAGCGGATCGAGGAAATCATCCGGACCACCGGC
AAAGAGAACGCCAAGTACCTGATCGAGAAGATCAAGCTGCACGACATGCAGGAAGGCAAGTGCCTGTACAGCC
TGGAAGCCATCCCTCTGGAAGATCTGCTGAACAACCCCTTCAACTATGAGGTGGACCACATCATCCCCAGAAGC
GTGTCCTTCGACAACAGCTTCAACAACAAGGTGCTCGTGAAGCAGGAAGAAGCCAGCAAGAAGGGCAACCGGA
CCCCATTCCAGTACCTGAGCAGCAGCGACAGCAAGATCAGCTACGAAACCTTCAAGAAGCACATCCTGAATCTG
GCCAAGGGCAAGGGCAGAATCAGCAAGACCAAGAAAGAGTATCTGCTGGAAGAACGGGACATCAACAGGTTCT
CCGTGCAGAAAGACTTCATCAACCGGAACCTGGTGGATACCAGATACGCCACCAGAGGCCTGATGAACCTGCT
GCGGAGCTACTTCAGAGTGAACAACCTGGACGTGAAAGTGAAGTCCATCAATGGCGGCTTCACCAGCTTTCTGC
GGCGGAAGTGGAAGTTTAAGAAAGAGCGGAACAAGGGGTACAAGCACCACGCCGAGGACGCCCTGATCATTGC
CAACGCCGATTTCATCTTCAAAGAGTGGAAGAAACTGGACAAGGCCAAAAAAGTGATGGAAAACCAGATGTTCG
AGGAAAAGCAGGCCGAGAGCATGCCCGAGATCGAAACCGAGCAGGAGTACAAAGAGATCTTCATCACCCCCCA
CCAGATCAAGCACATTAAGGACTTCAAGGACTACAAGTACAGCCACCGGGTGGACAAGAAGCCTAATAGAGAGC
TGATTAACGACACCCTGTACTCCACCCGGAAGGACGACAAGGGCAACACCCTGATCGTGAACAATCTGAACGGC
CTGTACGACAAGGACAATGACAAGCTGAAAAAGCTGATCAACAAGAGCCCCGAAAAGCTGCTGATGTACCACCA
CGACCCCCAGACCTACCAGAAACTGAAGCTGATTATGGAACAGTACGGCGACGAGAAGAATCCCCTGTACAAGT
ACTACGAGGAAACCGGGAACTACCTGACCAAGTACTCCAAAAAGGACAACGGCCCCGTGATCAAGAAGATTAAG
TATTACGGCAACAAACTGAACGCCCATCTGGACATCACCGACGACTACCCCAACAGCAGAAACAAGGTCGTGAA
GCTGTCCCTGAAGCCCTACAGATTCGACGTGTACCTGGACAATGGCGTGTACAAGTTCGTGACCGTGAAGAATC
TGGATGTGATCAAAAAAGAAAACTACTACGAAGTGAATAGCAAGTGCTATGAGGAAGCTAAGAAGCTGAAGAAGA
TCAGCAACCAGGCCGAGTTTATCGCCTCCTTCTACAACAACGATCTGATCAAGATCAACGGCGAGCTGTATAGA
GTGATCGGCGTGAACAACGACCTGCTGAACCGGATCGAAGTGAACATGATCGACATCACCTACCGCGAGTACCT
GGAAAACATGAACGACAAGAGGCCCCCCAGGATCATTAAGACAATCGCCTCCAAGACCCAGAGCATTAAGAAGT
ACAGCACAGACATTCTGGGCAACCTGTATGAAGTGAAATCTAAGAAGCACCCTCAGATCATCAAAAAGGGCAAAA
GGCCGGCGGCCACGAAAAAGGCCGGCCAGGCAAAAAAGAAAAAGGGATCCGGACGGGCTGACGCATTGGACG
ATTTTGATCTGGATATGCTGGGAAGTGACGCCCTCGATGATTTTGACCTTGACATGCTTGGTTCGGATGCCCTTG
ATGACTTTGACCTCGACATGCTCGGCAGTGACGCCCTTGATGATTTCGACCTGGACATGCTGATTAACTGTACAG
GCAGTGGAGAGGGCAGAGGAAGTCTGCTAACATGCGGTGACGTCGAGGAGAATCCTGGCCCAATGGCCAAGC
CTTTGTCTCAAGAAGAATCCACCCTCATTGAAAGAGCAACGGCTACAATCAACAGCATCCCCATCTCTGAAGACT
ACAGCGTCGCCAGCGCAGCTCTCTCTAGCGACGGCCGCATCTTCACTGGTGTCAATGTATATCATTTTACTGGG
GGACCTTGTGCAGAACTCGTGGTGCTGGGCACTGCTGCTGCTGCGGCAGCTGGCAACCTGACTTGTATCGTCG
CGATCGGAAATGAGAACAGGGGCATCTTGAGCCCCTGCGGACGGTGCCGACAGGTGCTTCTCGATCTGCATCC
TGGGATCAAAGCCATAGTGAAGGACAGTGATGGACAGCCGACGGCAGTTGGGATTCGTGAATTGCTGCCCTCT
GGTTATGTGTGGGAGGGCTAAGAATTCCTAGAGCTCGCTGATCAGCCTCGACTGTGCCTTCTAGTTGCCAGCCA
TCTGTTGTTTGCCCCTCCCCCGTGCCTTCCTTGACCCTGGAAGGTGCCACTCCCACTGTCCTTTCCTAATAAAAT
GAGGAAATTGCATCGCATTGTCTGAGTAGGTGTCATTCTATTCTGGGGGGTGGGGTGGGGCAGGACAGCAAGG
GGGAGGATTGGGAAGAGAATAGCAGGCATGCTGGGGAGGTACCGAGGGCCTATTTCCCATGATTCCTTCATATT
TGCATATACGATACAAGGCTGTTAGAGAGATAATTGGAATTAATTTGACTGTAAACACAAAGATATTAGTACAAAA
TACGTGACGTAGAAAGTAATAATTTCTTGGGTAGTTTGCAGTTTTAAAATTATGTTTTAAAATGGACTATCATATGC
TTACCGTAACTTGAAAGTATTTCGATTTCTTGGCTTTATATATCTTGTGGAAAGGACGAAAcaccGCCCCGGGAAC
CGCCATCAGGgTTTTAGTACTCTGGAAACAGAATCTACTAAAACAAGGCAAAATGCCGTGTTTATCTCGTCAACTT
GTTGGCGAGATTTTTGCGGCCGCAGGAACCCCTAGTGATGGAGTTGGCCACTCCCTCTCTGCGCGCTCGCTCG
CTCACTGAGGCCGGGCGACCAAAGGTCGCCCGACGCCCGGGCTTTGCCCGGGCGGCCTCAGTGAGCGAGCG
AGCGCGCAGCTGCCTGCAGGGGCGCCTGATGCGGTATTTTCTCCTTACGCATCTGTGCGGTATTTCACACCGCA
TACGTCAAAGCAACCATAGTACGCGCCCTGTAGCGGCGCATTAAGCGCGGCGGGTGTGGTGGTTACGCGCAGC
GTGACCGCTACACTTGCCAGCGCCTTAGCGCCCGCTCCTTTCGCTTTCTTCCCTTCCTTTCTCGCCACGTTCGC
CGGCTTTCCCCGTCAAGCTCTAAATCGGGGGCTCCCTTTAGGGTTCCGATTTAGTGCTTTACGGCACCTCGACC
CCAAAAAACTTGATTTGGGTGATGGTTCACGTAGTGGGCCATCGCCCTGATAGACGGTTTTTCGCCCTTTGACGT
TGGAGTCCACGTTCTTTAATAGTGGACTCTTGTTCCAAACTGGAACAACACTCAACTCTATCTCGGGCTATTCTTT
TGATTTATAAGGGATTTTGCCGATTTCGGTCTATTGGTTAAAAAATGAGCTGATTTAACAAAAATTTAACGCGAATT
TTAACAAAATATTAACGTTTACAATTTTATGGTGCACTCTCAGTACAATCTGCTCTGATGCCGCATAGTTAAGCCA
GCCCCGACACCCGCCAACACCCGCTGACGCGCCCTGACGGGCTTGTCTGCTCCCGGCATCCGCTTACAGACAA
GCTGTGACCGTCTCCGGGAGCTGCATGTGTCAGAGGTTTTCACCGTCATCACCGAAACGCGCGAGACGAAAGG
GCCTCGTGATACGCCTATTTTTATAGGTTAATGTCATGATAATAATGGTTTCTTAGACGTCAGGTGGCACTTTTCG
GGGAAATGTGCGCGGAACCCCTATTTGTTTATTTTTCTAAATACATTCAAATATGTATCCGCTCATGAGACAATAA
CCCTGATAAATGCTTCAATAATATTGAAAAAGGAAGAGTATGAGTATTCAACATTTCCGTGTCGCCCTTATTCCCT
TTTTTGCGGCATTTTGCCTTCCTGTTTTTGCTCACCCAGAAACGCTGGTGAAAGTAAAAGATGCTGAAGATCAGTT
GGGTGCACGAGTGGGTTACATCGAACTGGATCTCAACAGCGGTAAGATCCTTGAGAGTTTTCGCCCCGAAGAAC
GTTTTCCAATGATGAGCACTTTTAAAGTTCTGCTATGTGGCGCGGTATTATCCCGTATTGACGCCGGGCAAGAGC
AACTCGGTCGCCGCATACACTATTCTCAGAATGACTTGGTTGAGTACTCACCAGTCACAGAAAAGCATCTTACGG
ATGGCATGACAGTAAGAGAATTATGCAGTGCTGCCATAACCATGAGTGATAACACTGCGGCCAACTTACTTCTGA
CAACGATCGGAGGACCGAAGGAGCTAACCGCTTTTTTGCACAACATGGGGGATCATGTAACTCGCCTTGATCGT
TGGGAACCGGAGCTGAATGAAGCCATACCAAACGACGAGCGTGACACCACGATGCCTGTAGCAATGGCAACAA
CGTTGCGCAAACTATTAACTGGCGAACTACTTACTCTAGCTTCCCGGCAACAATTAATAGACTGGATGGAGGCG
GATAAAGTTGCAGGACCACTTCTGCGCTCGGCCCTTCCGGCTGGCTGGTTTATTGCTGATAAATCTGGAGCCGG
TGAGCGTGGAAGCCGCGGTATCATTGCAGCACTGGGGCCAGATGGTAAGCCCTCCCGTATCGTAGTTATCTACA
CGACGGGGAGTCAGGCAACTATGGATGAACGAAATAGACAGATCGCTGAGATAGGTGCCTCACTGATTAAGCAT
TGGTAACTGTCAGACCAAGTTTACTCATATATACTTTAGATTGATTTAAAACTTCATTTTTAATTTAAAAGGATCTAG
GTGAAGATCCTTTTTGATAATCTCATGACCAAAATCCCTTAACGTGAGTTTTCGTTCCACTGAGCGTCAGACCCC
GTAGAAAAGATCAAAGGATCTTCTTGAGATCCTTTTTTTCTGCGCGTAATCTGCTGCTTGCAAACAAAAAAACCAC
CGCTACCAGCGGTGGTTTGTTTGCCGGATCAAGAGCTACCAACTCTTTTTCCGAAGGTAACTGGCTTCAGCAGA
GCGCAGATACCAAATACTGTTCTTCTAGTGTAGCCGTAGTTAGGCCACCACTTCAAGAACTCTGTAGCACCGCCT
ACATACCTCGCTCTGCTAATCCTGTTACCAGTGGCTGCTGCCAGTGGCGATAAGTCGTGTCTTACCGGGTTGGA
CTCAAGACGATAGTTACCGGATAAGGCGCAGCGGTCGGGCTGAACGGGGGGTTCGTGCACACAGCCCAGCTTG
GAGCGAACGACCTACACCGAACTGAGATACCTACAGCGTGAGCTATGAGAAAGCGCCACGCTTCCCGAAGGGA
GAAAGGCGGACAGGTATCCGGTAAGCGGCAGGGTCGGAACAGGAGAGCGCACGAGGGAGCTTCCAGGGGGA
AACGCCTGGTATCTTTATAGTCCTGTCGGGTTTCGCCACCTCTGACTTGAGCGTCGATTTTTGTGATGCTCGTCA
GGGGGGCGGAGCCTATGGAAAAACGCCAGCAACGCGGCCTTTTTACGGTTCCTGGCCTTTTGCTGGCCTTTTG
CTCACATGT
pAAV-CMV-sadCas9-U6gRNA(Kcnj2-sa_sgRNA3) used in in vitro qPCR experiments (SEQ ID NO: 122)
CCTGCAGGCAGCTGCGCGCTCGCTCGCTCACTGAGGCCGCCCGGGCGTCGGGCGACCTTTGGTCGCCCGGCC
TCAGTGAGCGAGCGAGCGCGCAGAGAGGGAGTGGCCAACTCCATCACTAGGGGTTCCTGCGGCCTCTAGACTC
GAGGCGTTGACATTGATTATTGACTAGTTATTAATAGTAATCAATTACGGGGTCATTAGTTCATAGCCCATATATG
GAGTTCCGCGTTACATAACTTACGGTAAATGGCCCGCCTGGCTGACCGCCCAACGACCCCCGCCCATTGACGT
CAATAATGACGTATGTTCCCATAGTAACGCCAATAGGGACTTTCCATTGACGTCAATGGGTGGAGTATTTACGGT
AAACTGCCCACTTGGCAGTACATCAAGTGTATCATATGCCAAGTACGCCCCCTATTGACGTCAATGACGGTAAAT
GGCCCGCCTGGCATTATGCCCAGTACATGACCTTATGGGACTTTCCTACTTGGCAGTACATCTACGTATTAGTCA
TCGCTATTACCATGGTGATGCGGTTTTGGCAGTACATCAATGGGCGTGGATAGCGGTTTGACTCACGGGGATTT
CCAAGTCTCCACCCCATTGACGTCAATGGGAGTTTGTTTTGGCACCAAAATCAACGGGACTTTCCAAAATGTCGT
AACAACTCCGCCCCATTGACGCAAATGGGCGGTAGGCGTGTACGGTGGGAGGTCTATATAAGCAGAGCTCTCT
GGCTAACTACCGGTGCCACCATGGCCCCAAAGAAGAAGCGGAAGGTCGGTATCCACGGAGTCCCAGCAGCCAA
GCGGAACTACATCCTGGGCCTGGCCATCGGCATCACCAGCGTGGGCTACGGCATCATCGACTACGAGACACGG
GACGTGATCGATGCCGGCGTGCGGCTGTTCAAAGAGGCCAACGTGGAAAACAACGAGGGCAGGCGGAGCAAG
AGAGGCGCCAGAAGGCTGAAGCGGCGGAGGCGGCATAGAATCCAGAGAGTGAAGAAGCTGCTGTTCGACTAC
AACCTGCTGACCGACCACAGCGAGCTGAGCGGCATCAACCCCTACGAGGCCAGAGTGAAGGGCCTGAGCCAG
AAGCTGAGCGAGGAAGAGTTCTCTGCCGCCCTGCTGCACCTGGCCAAGAGAAGAGGCGTGCACAACGTGAACG
AGGTGGAAGAGGACACCGGCAACGAGCTGTCCACCAAAGAGCAGATCAGCCGGAACAGCAAGGCCCTGGAAG
AGAAATACGTGGCCGAACTGCAGCTGGAACGGCTGAAGAAAGACGGCGAAGTGCGGGGCAGCATCAACAGATT
CAAGACCAGCGACTACGTGAAAGAAGCCAAACAGCTGCTGAAGGTGCAGAAGGCCTACCACCAGCTGGACCAG
AGCTTCATCGACACCTACATCGACCTGCTGGAAACCCGGCGGACCTACTATGAGGGACCTGGCGAGGGCAGCC
CCTTCGGCTGGAAGGACATCAAAGAATGGTACGAGATGCTGATGGGCCACTGCACCTACTTCCCCGAGGAACT
GCGGAGCGTGAAGTACGCCTACAACGCCGACCTGTACAACGCCCTGAACGACCTGAACAATCTCGTGATCACC
AGGGACGAGAACGAGAAGCTGGAATATTACGAGAAGTTCCAGATCATCGAGAACGTGTTCAAGCAGAAGAAGAA
GCCCACCCTGAAGCAGATCGCCAAAGAAATCCTCGTGAACGAAGAGGATATTAAGGGCTACAGAGTGACCAGCA
CCGGCAAGCCCGAGTTCACCAACCTGAAGGTGTACCACGACATCAAGGACATTACCGCCCGGAAAGAGATTATT
GAGAACGCCGAGCTGCTGGATCAGATTGCCAAGATCCTGACCATCTACCAGAGCAGCGAGGACATCCAGGAAG
AACTGACCAATCTGAACTCCGAGCTGACCCAGGAAGAGATCGAGCAGATCTCTAATCTGAAGGGCTATACCGGC
ACCCACAACCTGAGCCTGAAGGCCATCAACCTGATCCTGGACGAGCTGTGGCACACCAACGACAACCAGATCG
CTATCTTCAACCGGCTGAAGCTGGTGCCCAAGAAGGTGGACCTGTCCCAGCAGAAAGAGATCCCCACCACCCT
GGTGGACGACTTCATCCTGAGCCCCGTCGTGAAGAGAAGCTTCATCCAGAGCATCAAAGTGATCAACGCCATCA
TCAAGAAGTACGGCCTGCCCAACGACATCATTATCGAGCTGGCCCGCGAGAAGAACTCCAAGGACGCCCAGAA
AATGATCAACGAGATGCAGAAGCGGAACCGGCAGACCAACGAGCGGATCGAGGAAATCATCCGGACCACCGGC
AAAGAGAACGCCAAGTACCTGATCGAGAAGATCAAGCTGCACGACATGCAGGAAGGCAAGTGCCTGTACAGCC
TGGAAGCCATCCCTCTGGAAGATCTGCTGAACAACCCCTTCAACTATGAGGTGGACCACATCATCCCCAGAAGC
GTGTCCTTCGACAACAGCTTCAACAACAAGGTGCTCGTGAAGCAGGAAGAAGCCAGCAAGAAGGGCAACCGGA
CCCCATTCCAGTACCTGAGCAGCAGCGACAGCAAGATCAGCTACGAAACCTTCAAGAAGCACATCCTGAATCTG
GCCAAGGGCAAGGGCAGAATCAGCAAGACCAAGAAAGAGTATCTGCTGGAAGAACGGGACATCAACAGGTTCT
CCGTGCAGAAAGACTTCATCAACCGGAACCTGGTGGATACCAGATACGCCACCAGAGGCCTGATGAACCTGCT
GCGGAGCTACTTCAGAGTGAACAACCTGGACGTGAAAGTGAAGTCCATCAATGGCGGCTTCACCAGCTTTCTGC
GGCGGAAGTGGAAGTTTAAGAAAGAGCGGAACAAGGGGTACAAGCACCACGCCGAGGACGCCCTGATCATTGC
CAACGCCGATTTCATCTTCAAAGAGTGGAAGAAACTGGACAAGGCCAAAAAAGTGATGGAAAACCAGATGTTCG
AGGAAAAGCAGGCCGAGAGCATGCCCGAGATCGAAACCGAGCAGGAGTACAAAGAGATCTTCATCACCCCCCA
CCAGATCAAGCACATTAAGGACTTCAAGGACTACAAGTACAGCCACCGGGTGGACAAGAAGCCTAATAGAGAGC
TGATTAACGACACCCTGTACTCCACCCGGAAGGACGACAAGGGCAACACCCTGATCGTGAACAATCTGAACGGC
CTGTACGACAAGGACAATGACAAGCTGAAAAAGCTGATCAACAAGAGCCCCGAAAAGCTGCTGATGTACCACCA
CGACCCCCAGACCTACCAGAAACTGAAGCTGATTATGGAACAGTACGGCGACGAGAAGAATCCCCTGTACAAGT
ACTACGAGGAAACCGGGAACTACCTGACCAAGTACTCCAAAAAGGACAACGGCCCCGTGATCAAGAAGATTAAG
TATTACGGCAACAAACTGAACGCCCATCTGGACATCACCGACGACTACCCCAACAGCAGAAACAAGGTCGTGAA
GCTGTCCCTGAAGCCCTACAGATTCGACGTGTACCTGGACAATGGCGTGTACAAGTTCGTGACCGTGAAGAATC
TGGATGTGATCAAAAAAGAAAACTACTACGAAGTGAATAGCAAGTGCTATGAGGAAGCTAAGAAGCTGAAGAAGA
TCAGCAACCAGGCCGAGTTTATCGCCTCCTTCTACAACAACGATCTGATCAAGATCAACGGCGAGCTGTATAGA
GTGATCGGCGTGAACAACGACCTGCTGAACCGGATCGAAGTGAACATGATCGACATCACCTACCGCGAGTACCT
GGAAAACATGAACGACAAGAGGCCCCCCAGGATCATTAAGACAATCGCCTCCAAGACCCAGAGCATTAAGAAGT
ACAGCACAGACATTCTGGGCAACCTGTATGAAGTGAAATCTAAGAAGCACCCTCAGATCATCAAAAAGGGCAAAA
GGCCGGCGGCCACGAAAAAGGCCGGCCAGGCAAAAAAGAAAAAGGGATCCGGACGGGCTGACGCATTGGACG
ATTTTGATCTGGATATGCTGGGAAGTGACGCCCTCGATGATTTTGACCTTGACATGCTTGGTTCGGATGCCCTTG
ATGACTTTGACCTCGACATGCTCGGCAGTGACGCCCTTGATGATTTCGACCTGGACATGCTGATTAACTGTACAG
GCAGTGGAGAGGGCAGAGGAAGTCTGCTAACATGCGGTGACGTCGAGGAGAATCCTGGCCCAATGGCCAAGC
CTTTGTCTCAAGAAGAATCCACCCTCATTGAAAGAGCAACGGCTACAATCAACAGCATCCCCATCTCTGAAGACT
ACAGCGTCGCCAGCGCAGCTCTCTCTAGCGACGGCCGCATCTTCACTGGTGTCAATGTATATCATTTTACTGGG
GGACCTTGTGCAGAACTCGTGGTGCTGGGCACTGCTGCTGCTGCGGCAGCTGGCAACCTGACTTGTATCGTCG
CGATCGGAAATGAGAACAGGGGCATCTTGAGCCCCTGCGGACGGTGCCGACAGGTGCTTCTCGATCTGCATCC
TGGGATCAAAGCCATAGTGAAGGACAGTGATGGACAGCCGACGGCAGTTGGGATTCGTGAATTGCTGCCCTCT
GGTTATGTGTGGGAGGGCTAAGAATTCCTAGAGCTCGCTGATCAGCCTCGACTGTGCCTTCTAGTTGCCAGCCA
TCTGTTGTTTGCCCCTCCCCCGTGCCTTCCTTGACCCTGGAAGGTGCCACTCCCACTGTCCTTTCCTAATAAAAT
GAGGAAATTGCATCGCATTGTCTGAGTAGGTGTCATTCTATTCTGGGGGGTGGGGTGGGGCAGGACAGCAAGG
GGGAGGATTGGGAAGAGAATAGCAGGCATGCTGGGGAGGTACCGAGGGCCTATTTCCCATGATTCCTTCATATT
TGCATATACGATACAAGGCTGTTAGAGAGATAATTGGAATTAATTTGACTGTAAACACAAAGATATTAGTACAAAA
TACGTGACGTAGAAAGTAATAATTTCTTGGGTAGTTTGCAGTTTTAAAATTATGTTTTAAAATGGACTATCATATGC
TTACCGTAACTTGAAAGTATTTCGATTTCTTGGCTTTATATATCTTGTGGAAAGGACGAAAcaccCAGAGCCAGGGT
CCGCGGGTGgTTTTAGTACTCTGGAAACAGAATCTACTAAAACAAGGCAAAATGCCGTGTTTATCTCGTCAACTT
GTTGGCGAGATTTTTGCGGCCGCAGGAACCCCTAGTGATGGAGTTGGCCACTCCCTCTCTGCGCGCTCGCTCG
CTCACTGAGGCCGGGCGACCAAAGGTCGCCCGACGCCCGGGCTTTGCCCGGGCGGCCTCAGTGAGCGAGCG
AGCGCGCAGCTGCCTGCAGGGGCGCCTGATGCGGTATTTTCTCCTTACGCATCTGTGCGGTATTTCACACCGCA
TACGTCAAAGCAACCATAGTACGCGCCCTGTAGCGGCGCATTAAGCGCGGCGGGTGTGGTGGTTACGCGCAGC
GTGACCGCTACACTTGCCAGCGCCTTAGCGCCCGCTCCTTTCGCTTTCTTCCCTTCCTTTCTCGCCACGTTCGC
CGGCTTTCCCCGTCAAGCTCTAAATCGGGGGCTCCCTTTAGGGTTCCGATTTAGTGCTTTACGGCACCTCGACC
CCAAAAAACTTGATTTGGGTGATGGTTCACGTAGTGGGCCATCGCCCTGATAGACGGTTTTTCGCCCTTTGACGT
TGGAGTCCACGTTCTTTAATAGTGGACTCTTGTTCCAAACTGGAACAACACTCAACTCTATCTCGGGCTATTCTTT
TGATTTATAAGGGATTTTGCCGATTTCGGTCTATTGGTTAAAAAATGAGCTGATTTAACAAAAATTTAACGCGAATT
TTAACAAAATATTAACGTTTACAATTTTATGGTGCACTCTCAGTACAATCTGCTCTGATGCCGCATAGTTAAGCCA
GCCCCGACACCCGCCAACACCCGCTGACGCGCCCTGACGGGCTTGTCTGCTCCCGGCATCCGCTTACAGACAA
GCTGTGACCGTCTCCGGGAGCTGCATGTGTCAGAGGTTTTCACCGTCATCACCGAAACGCGCGAGACGAAAGG
GCCTCGTGATACGCCTATTTTTATAGGTTAATGTCATGATAATAATGGTTTCTTAGACGTCAGGTGGCACTTTTCG
GGGAAATGTGCGCGGAACCCCTATTTGTTTATTTTTCTAAATACATTCAAATATGTATCCGCTCATGAGACAATAA
CCCTGATAAATGCTTCAATAATATTGAAAAAGGAAGAGTATGAGTATTCAACATTTCCGTGTCGCCCTTATTCCCT
TTTTTGCGGCATTTTGCCTTCCTGTTTTTGCTCACCCAGAAACGCTGGTGAAAGTAAAAGATGCTGAAGATCAGTT
GGGTGCACGAGTGGGTTACATCGAACTGGATCTCAACAGCGGTAAGATCCTTGAGAGTTTTCGCCCCGAAGAAC
GTTTTCCAATGATGAGCACTTTTAAAGTTCTGCTATGTGGCGCGGTATTATCCCGTATTGACGCCGGGCAAGAGC
AACTCGGTCGCCGCATACACTATTCTCAGAATGACTTGGTTGAGTACTCACCAGTCACAGAAAAGCATCTTACGG
ATGGCATGACAGTAAGAGAATTATGCAGTGCTGCCATAACCATGAGTGATAACACTGCGGCCAACTTACTTCTGA
CAACGATCGGAGGACCGAAGGAGCTAACCGCTTTTTTGCACAACATGGGGGATCATGTAACTCGCCTTGATCGT
TGGGAACCGGAGCTGAATGAAGCCATACCAAACGACGAGCGTGACACCACGATGCCTGTAGCAATGGCAACAA
CGTTGCGCAAACTATTAACTGGCGAACTACTTACTCTAGCTTCCCGGCAACAATTAATAGACTGGATGGAGGCG
GATAAAGTTGCAGGACCACTTCTGCGCTCGGCCCTTCCGGCTGGCTGGTTTATTGCTGATAAATCTGGAGCCGG
TGAGCGTGGAAGCCGCGGTATCATTGCAGCACTGGGGCCAGATGGTAAGCCCTCCCGTATCGTAGTTATCTACA
CGACGGGGAGTCAGGCAACTATGGATGAACGAAATAGACAGATCGCTGAGATAGGTGCCTCACTGATTAAGCAT
TGGTAACTGTCAGACCAAGTTTACTCATATATACTTTAGATTGATTTAAAACTTCATTTTTAATTTAAAAGGATCTAG
GTGAAGATCCTTTTTGATAATCTCATGACCAAAATCCCTTAACGTGAGTTTTCGTTCCACTGAGCGTCAGACCCC
GTAGAAAAGATCAAAGGATCTTCTTGAGATCCTTTTTTTCTGCGCGTAATCTGCTGCTTGCAAACAAAAAAACCAC
CGCTACCAGCGGTGGTTTGTTTGCCGGATCAAGAGCTACCAACTCTTTTTCCGAAGGTAACTGGCTTCAGCAGA
GCGCAGATACCAAATACTGTTCTTCTAGTGTAGCCGTAGTTAGGCCACCACTTCAAGAACTCTGTAGCACCGCCT
ACATACCTCGCTCTGCTAATCCTGTTACCAGTGGCTGCTGCCAGTGGCGATAAGTCGTGTCTTACCGGGTTGGA
CTCAAGACGATAGTTACCGGATAAGGCGCAGCGGTCGGGCTGAACGGGGGGTTCGTGCACACAGCCCAGCTTG
GAGCGAACGACCTACACCGAACTGAGATACCTACAGCGTGAGCTATGAGAAAGCGCCACGCTTCCCGAAGGGA
GAAAGGCGGACAGGTATCCGGTAAGCGGCAGGGTCGGAACAGGAGAGCGCACGAGGGAGCTTCCAGGGGGA
AACGCCTGGTATCTTTATAGTCCTGTCGGGTTTCGCCACCTCTGACTTGAGCGTCGATTTTTGTGATGCTCGTCA
GGGGGGCGGAGCCTATGGAAAAACGCCAGCAACGCGGCCTTTTTACGGTTCCTGGCCTTTTGCTGGCCTTTTG
CTCACATGT
2. Sequences for in vitro screening using multielectrode arrays (MEA)-EPILEPSY
pAAV-U6gRNA(LacZ-sa_sgRNA)-shCaMKII-sadCas9-VP64 used as control in in vitro experiments (SEQ ID
NO: 123) (the sequence for shCaMKII is represented by ″[XXX]″)
cctgcaggcagctgcgcgctcgctcgctcactgaggccgcccgggcaaagcccgggcgtcgggcgacctttggtcgcccggcctcagtgagcgagcgagcgcg
cagagagggagtggccaactccatcactaggggttcctgcggccgcacgcgtggtaccgagggcctatttcccatgattccttcatatttgcatatacgatacaaggct
gttagagagataattggaattaatttgactgtaaacacaaagatattagtacaaaatacgtgacgtagaaagtaataatttcttgggtagtttgcagttttaaaattatgtttt
aaaatggactatcatatgcttaccgtaacttgaaagtatttcgatttcttggctttatatatcttgtggaaaggacgaaacaccgTGCGAATACGCCCACGCG
ATgtttttagtactctggaaacagaatctactaaaacaaggcaaaatgccgtgtttatctcgtcaacttgttggcgagatttttgcgacgcgtAATTccacggggttAA
TCGAA[XXX]gatatcgAATTCGGTACCACCGGTgccaccatggccccaaagaagaagcggaaggtcggtatccacggagtcccagcagccaa
gcggaactacatcctgggcctggccatcggcatcaccagcgtgggctacggcatcatcgactacgagacacgggacgtgatcgatgccggcgtgcggctgttcaa
agaggccaacgtggaaaacaacgagggcaggcggagcaagagaggcgccagaaggctgaagcggcggaggcggcatagaatccagagagtgaagaag
ctgctgttcgactacaacctgctgaccgaccacagcgagctgagcggcatcaacccctacgaggccagagtgaagggcctgagccagaagctgagcgaggaag
agttctctgccgccctgctgcacctggccaagagaagaggcgtgcacaacgtgaacgaggtggaagaggacaccggcaacgagctgtccaccaaagagcaga
tcagccggaacagcaaggccctggaagagaaatacgtggccgaactgcagctggaacggctgaagaaagacggcgaagtgcggggcagcatcaacagattc
aagaccagcgactacgtgaaagaagccaaacagctgctgaaggtgcagaaggcctaccaccagctggaccagagcttcatcgacacctacatcgacctgctgg
aaacccggcggacctactatgagggacctggcgagggcagccccttcggctggaaggacatcaaagaatggtacgagatgctgatgggccactgcacctacttc
cccgaggaactgcggagcgtgaagtacgcctacaacgccgacctgtacaacgccctgaacgacctgaacaatctcgtgatcaccagggacgagaacgagaag
ctggaatattacgagaagttccagatcatcgagaacgtgttcaagcagaagaagaagcccaccctgaagcagatcgccaaagaaatcctcgtgaacgaagagg
atattaagggctacagagtgaccagcaccggcaagcccgagttcaccaacctgaaggtgtaccacgacatcaaggacattaccgcccggaaagagattattgag
aacgccgagctgctggatcagattgccaagatcctgaccattaccagagcagcgaggacatccaggaagaactgaccaatctgaactccgagctgacccagga
agagatcgagcagatctctaatctgaagggctataccggcacccacaacctgagcctgaaggccatcaacctgatcctggacgagctgtggcacaccaacgaca
accagatcgctatcttcaaccggctgaagctggtgcccaagaaggtggacctgtcccagcagaaagagatccccaccaccctggtggacgacttcatcctgagccc
cgtcgtgaagagaagcttcatccagagcatcaaagtgatcaacgccatcatcaagaagtacggcctgcccaacgacatcattatcgagctggcccgcgagaaga
actccaaggacgcccagaaaatgatcaacgagatgcagaagcggaaccggcagaccaacgagcggatcgaggaaatcatccggaccaccggcaaagaga
acgccaagtacctgatcgagaagatcaagctgcacgacatgcaggaaggcaagtgcctgtacagcctggaagccatccctctggaagatctgctgaacaacccct
tcaactatgaggtggaccacatcatccccagaagcgtgtccttcgacaacagcttcaacaacaaggtgctcgtgaagcaggaagaagccagcaagaagggcaa
ccggaccccattccagtacctgagcagcagcgacagcaagatcagctacgaaaccttcaagaagcacatcctgaatctggccaagggcaagggcagaatcagc
aagaccaagaaagagtatctgctggaagaacgggacatcaacaggttctccgtgcagaaagacttcatcaaccggaacctggtggataccagatacgccaccag
aggcctgatgaacctgctgcggagctacttcagagtgaacaacctggacgtgaaagtgaagtccatcaatggcggcttcaccagctttctgcggcggaagtggaag
tttaagaaagagcggaacaaggggtacaagcaccacgccgaggacgccctgatcattgccaacgccgatttcatcttcaaagagtggaagaaactggacaagg
ccaaaaaagtgatggaaaaccagatgttcgaggaaaagcaggccgagagcatgcccgagatcgaaaccgagcaggagtacaaagagatcttcatcacccccc
accagatcaagcacattaaggacttcaaggactacaagtacagccaccgggggacaagaagcctaatagagagctgattaacgacaccctgtactccacccgg
aaggacgacaagggcaacaccctgatcgtgaacaatctgaacggcctgtacgacaaggacaatgacaagctgaaaaagctgatcaacaagagccccgaaaa
gctgctgatgtaccaccacgacccccagacctaccagaaactgaagctgattatggaacagtacggcgacgagaagaatcccctgtacaagtactacgaggaaa
ccgggaactacctgaccaagtactccaaaaaggacaacggccccgtgatcaagaagattaagtattacggcaacaaactgaacgcccatctggacatcaccgac
gactaccccaacagcagaaacaaggtcgtgaagctgtccctgaagccctacagattcgacgtgtacctggacaatggcgtgtacaagttcgtgaccgtgaagaatc
tggatgtgatcaaaaaagaaaactactacgaagtgaatagcaagtgctatgaggaagctaagaagctgaagaagatcagcaaccaggccgagtttatcgcctcct
tctacaacaacgatctgatcaagatcaacggcgagctgtatagagtgatcggcgtgaacaacgacctgctgaaccggatcgaagtgaacatgatcgacatcaccta
ccgcgagtacctggaaaacatgaacgacaagaggccccccaggatcattaagacaatcgcctccaagacccagagcattaagaagtacagcacagacattctg
ggcaacctgtatgaagtgaaatctaagaagcaccctcagatcatcaaaaagggcaaaaggccggcggccacgaaaaaggccggccaggcaaaaaagaaaa
agggatccgaggccagcggttccggacgggctgacgcattggacgattttgatctggatatgctgggaagtgacgccctcgatgattttgaccttgacatgcttggttcg
gatgcccttgatgactttgacctcgacatgctcggcagtgacgcccttgatgatttcgacctggacatgctgattaactcaagatgatctagacatatggatatctgactag
tctcgagtttattgcagcttataatggttacaaataaagcaatagcatcacaaatttcacaaataaagcatttttttcactggaccgagcggccgcaggaacccctagtg
atggagttggccactccctctctgcgcgctcgctcgctcactgaggccgggcgaccaaaggtcgcccgacgcccgggctttgcccgggcggcctcagtgagcgag
cgagcgcgcagctgcctgcaggggcgcctgatgcggtattttctccttacgcatctgtgcggtatttcacaccgcatacgtcaaagcaaccatagtacgcgccctgtag
cggcgcattaagcgcggcgggtgtggtggttacgcgcagcgtgaccgctacacttgccagcgccctagcgcccgctcctttcgctttcttcccttcctttctcgccacgttc
gccggctttccccgtcaagctctaaatcgggggctccctttagggttccgatttagtgctttacggcacctcgaccccaaaaaacttgatttgggtgatggttcacgtagtg
ggccatcgccctgatagacggtttttcgccctttgacgttggagtccacgttctttaatagtggactcttgttccaaactggaacaacactcaaccctatctcgggctattcttt
tgatttataagggattttgccgatttcggcctattggttaaaaaatgagctgatttaacaaaaatttaacgcgaattttaacaaaatattaacgtttacaattttatggtgcact
ctcagtacaatctgctctgatgccgcatagttaagccagccccgacacccgccaacacccgctgacgcgccctgacgggcttgtctgctcccggcatccgcttacag
acaagctgtgaccgtctccgggagctgcatgtgtcagaggttttcaccgtcatcaccgaaacgcgcgagacgaaagggcctcgtgatacgcctatttttataggttaat
gtcatgataataatggtttcttagacgtcaggtggcacttttcggggaaatgtgcgcggaacccctatttgtttatttttctaaatacattcaaatatgtatccgctcatgagac
aataaccctgataaatgcttcaataatattgaaaaaggaagagtatgagtattcaacatttccgtgtcgcccttattcccttttttgcggcattttgccttcctgtttttgctcacc
cagaaacgctggtgaaagtaaaagatgctgaagatcagttgggtgcacgagtgggttacatcgaactggatctcaacagcggtaagatccttgagagttttcgcccc
gaagaacgttttccaatgatgagcacttttaaagttctgctatgtggcgcggtattatcccgtattgacgccgggcaagagcaactcggtcgccgcatacactattctcag
aatgacttggttgagtactcaccagtcacagaaaagcatcttacggatggcatgacagtaagagaattatgcagtgctgccataaccatgagtgataacactgcggc
caacttacttctgacaacgatcggaggaccgaaggagctaaccgcttttttgcacaacatgggggatcatgtaactcgccttgatcgttgggaaccggagctgaatga
agccataccaaacgacgagcgtgacaccacgatgcctgtagcaatggcaacaacgttgcgcaaactattaactggcgaactacttactctagcttcccggcaacaa
ttaatagactggatggaggcggataaagttgcaggaccacttctgcgctcggcccttccggctggctggtttattgctgataaatctggagccggtgagcgtgggtctcg
cggtatcattgcagcactggggccagatggtaagccctcccgtatcgtagttatctacacgacggggagtcaggcaactatggatgaacgaaatagacagatcgct
gagataggtgcctcactgattaagcattggtaactgtcagaccaagtttactcatatatactttagattgatttaaaacttcatttttaatttaaaaggatctaggtgaagatcc
tttttgataatctcatgaccaaaatcccttaacgtgagttttcgttccactgagcgtcagaccccgtagaaaagatcaaaggatcttcttgagatcctttttttctgcgcgtaat
ctgctgcttgcaaacaaaaaaaccaccgctaccagcggtggtttgtttgccggatcaagagctaccaactctttttccgaaggtaactggcttcagcagagcgcagat
accaaatactgtccttctagtgtagccgtagttaggccaccacttcaagaactctgtagcaccgcctacatacctcgctctgctaatcctgttaccagtggctgctgccagt
ggcgataagtcgtgtcttaccgggttggactcaagacgatagttaccggataaggcgcagcggtcgggctgaacggggggttcgtgcacacagcccagcttggag
cgaacgacctacaccgaactgagatacctacagcgtgagctatgagaaagcgccacgcttcccgaagggagaaaggcggacaggtatccggtaagcggcagg
gtcggaacaggagagcgcacgagggagcttccagggggaaacgcctggtatctttatagtcctgtcgggtttcgccacctctgacttgagcgtcgatttttgtgatgctc
gtcaggggggcggagcctatggaaaaacgccagcaacgcggcctttttacggttcctggccttttgctggccttttgctcacatgt
pAAV-U6gRNA(Kcna2-sa_sgRNA2)-shCaMKII-sadCas9-VP64 used in in vitro experiments (SEQ ID NO: 124)
(the sequence for shCaMKII is represented by ″[XXX]″)
cctgcaggcagctgcgcgctcgctcgctcactgaggccgcccgggcaaagcccgggcgtcgggcgacctttggtcgcccggcctcagtgagcgagcgagcgcg
cagagagggagtggccaactccatcactaggggttcctgcggccgcacgcgtggtaccgagggcctatttcccatgattccttcatatttgcatatacgatacaaggct
gttagagagataattggaattaatttgactgtaaacacaaagatattagtacaaaatacgtgacgtagaaagtaataatttcttgggtagtttgcagttttaaaattatgtttt
aaaatggactatcatatgcttaccgtaacttgaaagtatttcgatttcttggctttatatatcttgtggaaaggacgaaacaccGCCCCAGCCGGCCCCTTTA
ATgttttagtactctggaaacagaatctactaaaacaaggcaaaatgccgtgtttatctcgtcaacttgttggcgagatttttgcgacgcgtAATTccacggggttAAT
CGAA[XXX]gatatcgAATTCGGTACCACCGGTgccaccatggccccaaagaagaagcggaaggtcggtatccacggagtcccagcagccaagc
ggaactacatcctgggcctggccatcggcatcaccagcgtgggctacggcatcatcgactacgagacacgggacgtgatcgatgccggcgtgcggctgttcaaag
aggccaacgtggaaaacaacgagggcaggcggagcaagagaggcgccagaaggctgaagcggcggaggggcatagaatccagagagtgaagaagctg
ctgttcgactacaacctgctgaccgaccacagcgagctgagcggcatcaacccctacgaggccagagtgaagggcctgagccagaagctgagcgaggaagag
ttctctgccgccctgctgcacctggccaagagaagaggcgtgcacaacgtgaacgaggtggaagaggacaccggcaacgagctgtccaccaaagagcagatc
agccggaacagcaaggccctggaagagaaatacgtggccgaactgcagctggaacggctgaagaaagacggcgaagtgcggggcagcatcaacagattca
agaccagcgactacgtgaaagaagccaaacagctgctgaaggtgcagaaggcctaccaccagctggaccagagcttcatcgacacctacatcgacctgctgga
aacccggcggacctactatgagggacctggcgagggcagccccttcggctggaaggacatcaaagaatggtacgagatgctgatgggccactgcacctacttccc
cgaggaactgcggagcgtgaagtacgcctacaacgccgacctgtacaacgccctgaacgacctgaacaatctcgtgatcaccagggacgagaacgagaagct
ggaatattacgagaagttccagatcatcgagaacgtgttcaagcagaagaagaagcccaccctgaagcagatcgccaaagaaatcctcgtgaacgaagaggat
attaagggctacagagtgaccagcaccggcaagcccgagttcaccaacctgaaggtgtaccacgacatcaaggacattaccgcccggaaagagattattgagaa
cgccgagctgctggatcagattgccaagatcctgaccatctaccagagcagcgaggacatccaggaagaactgaccaatctgaactccgagctgacccaggaag
agatcgagcagatctctaatctgaagggctataccggcacccacaacctgagcctgaaggccatcaacctgatcctggacgagctgtggcacaccaacgacaac
cagatcgctatcttcaaccggctgaagctggtgcccaagaaggtggacctgtcccagcagaaagagatccccaccaccctggtggacgacttcatcctgagccccg
tcgtgaagagaagcttcatccagagcatcaaagtgatcaacgccatcatcaagaagtacggcctgcccaacgacatcattatcgagctggcccgcgagaagaact
ccaaggacgcccagaaaatgatcaacgagatgcagaagcggaaccggcagaccaacgagcggatcgaggaaatcatccggaccaccggcaaagagaacg
ccaagtacctgatcgagaagatcaagctgcacgacatgcaggaaggcaagtgcctgtacagcctggaagccatccctctggaagatctgctgaacaaccccttca
actatgaggtggaccacatcatccccagaagcgtgtccttcgacaacagcttcaacaacaaggtgctcgtgaagcaggaagaagccagcaagaagggcaaccg
gaccccattccagtacctgagcagcagcgacagcaagatcagctacgaaaccttcaagaagcacatcctgaatctggccaagggcaagggcagaatcagcaa
gaccaagaaagagtatctgctggaagaacgggacatcaacaggttctccgtgcagaaagacttcatcaaccggaacctggtggataccagatacgccaccagag
gcctgatgaacctgctgcggagctacttcagagtgaacaacctggacgtgaaagtgaagtccatcaatggcggcttcaccagctttctgcggcggaagtggaagttt
aagaaagagcggaacaaggggtacaagcaccacgccgaggacgccctgatcattgccaacgccgatttcatcttcaaagagtggaagaaactggacaaggcc
aaaaaagtgatggaaaaccagatgttcgaggaaaagcaggccgagagcatgcccgagatcgaaaccgagcaggagtacaaagagatcttcatcacccccca
ccagatcaagcacattaaggacttcaaggactacaagtacagccaccgggggacaagaagcctaatagagagctgattaacgacaccctgtactccacccgga
aggacgacaagggcaacaccctgatcgtgaacaatctgaacggcctgtacgacaaggacaatgacaagctgaaaaagctgatcaacaagagccccgaaaag
ctgctgatgtaccaccacgacccccagacctaccagaaactgaagctgattatggaacagtacggcgacgagaagaatcccctgtacaagtactacgaggaaac
cgggaactacctgaccaagtactccaaaaaggacaacggccccgtgatcaagaagattaagtattacggcaacaaactgaacgcccatctggacatcaccgac
gactaccccaacagcagaaacaaggtcgtgaagctgtccctgaagccctacagattcgacgtgtacctggacaatggcgtgtacaagttcgtgaccgtgaagaatc
tggatgtgatcaaaaaagaaaactactacgaagtgaatagcaagtgctatgaggaagctaagaagctgaagaagatcagcaaccaggccgagtttatcgcctcct
tctacaacaacgatctgatcaagatcaacggcgagctgtatagagtgatcggcgtgaacaacgacctgctgaaccggatcgaagtgaacatgatcgacatcaccta
ccgcgagtacctggaaaacatgaacgacaagaggccccccaggatcattaagacaatcgcctccaagacccagagcattaagaagtacagcacagacattctg
ggcaacctgtatgaagtgaaatctaagaagcaccctcagatcatcaaaaagggcaaaaggccggcggccacgaaaaaggccggccaggcaaaaaagaaaa
agggatccgaggccagcggttccggacgggctgacgcattggacgattttgatctggatatgctgggaagtgacgccctcgatgattttgaccttgacatgcttggttcg
gatgcccttgatgactttgacctcgacatgctcggcagtgacgcccttgatgatttcgacctggacatgctgattaactcaagatgatctagacatatggatatctgactag
tctcgagtttattgcagcttataatggttacaaataaagcaatagcatcacaaatttcacaaataaagcatttttttcactggaccgagcggccgcaggaacccctagtg
atggagttggccactccctctctgcgcgctcgctcgctcactgaggccgggcgaccaaaggtcgcccgacgcccgggctttgcccgggcggcctcagtgagcgag
cgagcgcgcagctgcctgcaggggcgcctgatgcggtattttctccttacgcatctgtgcggtatttcacaccgcatacgtcaaagcaaccatagtacgcgccctgtag
cggcgcattaagcgcggcgggtgtggtggttacgcgcagcgtgaccgctacacttgccagcgccctagcgcccgctcctttcgctttcttcccttcctttctcgccacgttc
gccggctttccccgtcaagctctaaatcgggggctccctttagggttccgatttagtgctttacggcacctcgaccccaaaaaacttgatttgggtgatggttcacgtagtg
ggccatcgccctgatagacggtttttcgccctttgacgttggagtccacgttctttaatagtggactcttgttccaaactggaacaacactcaaccctatctcgggctattcttt
tgatttataagggattttgccgatttcggcctattggttaaaaaatgagctgatttaacaaaaatttaacgcgaattttaacaaaatattaacgtttacaattttatggtgcact
ctcagtacaatctgctctgatgccgcatagttaagccagccccgacacccgccaacacccgctgacgcgccctgacgggcttgtctgctcccggcatccgcttacag
acaagctgtgaccgtctccgggagctgcatgtgtcagaggttttcaccgtcatcaccgaaacgcgcgagacgaaagggcctcgtgatacgcctatttttataggttaat
gtcatgataataatggtttcttagacgtcaggtggcacttttcggggaaatgtgcgcggaacccctatttgtttatttttctaaatacattcaaatatgtatccgctcatgagac
aataaccctgataaatgcttcaataatattgaaaaaggaagagtatgagtattcaacatttccgtgtcgcccttattcccttttttgcggcattttgccttcctgtttttgctcacc
cagaaacgctggtgaaagtaaaagatgctgaagatcagttgggtgcacgagtgggttacatcgaactggatctcaacagcggtaagatccttgagagttttcgcccc
gaagaacgttttccaatgatgagcacttttaaagttctgctatgtggcgcggtattatcccgtattgacgccgggcaagagcaactcggtcgccgcatacactattctcag
aatgacttggttgagtactcaccagtcacagaaaagcatcttacggatggcatgacagtaagagaattatgcagtgctgccataaccatgagtgataacactgcggc
caacttacttctgacaacgatcggaggaccgaaggagctaaccgcttttttgcacaacatgggggatcatgtaactcgccttgatcgttgggaaccggagctgaatga
agccataccaaacgacgagcgtgacaccacgatgcctgtagcaatggcaacaacgttgcgcaaactattaactggcgaactacttactctagcttcccggcaacaa
ttaatagactggatggaggcggataaagttgcaggaccacttctgcgctcggcccttccggctggctggtttattgctgataaatctggagccggtgagcgtgggtctcg
cggtatcattgcagcactggggccagatggtaagccctcccgtatcgtagttatctacacgacggggagtcaggcaactatggatgaacgaaatagacagatcgct
gagataggtgcctcactgattaagcattggtaactgtcagaccaagtttactcatatatactttagattgatttaaaacttcatttttaatttaaaaggatctaggtgaagatcc
tttttgataatctcatgaccaaaatcccttaacgtgagttttcgttccactgagcgtcagaccccgtagaaaagatcaaaggatcttcttgagatcctttttttctgcgcgtaat
ctgctgcttgcaaacaaaaaaaccaccgctaccagcggtggtttgtttgccggatcaagagctaccaactctttttccgaaggtaactggcttcagcagagcgcagat
accaaatactgtccttctagtgtagccgtagttaggccaccacttcaagaactctgtagcaccgcctacatacctcgctctgctaatcctgttaccagtggctgctgccagt
ggcgataagtcgtgtcttaccgggttggactcaagacgatagttaccggataaggcgcagcggtcgggctgaacggggggttcgtgcacacagcccagcttggag
cgaacgacctacaccgaactgagatacctacagcgtgagctatgagaaagcgccacgcttcccgaagggagaaaggcggacaggtatccggtaagcggcagg
gtcggaacaggagagcgcacgagggagcttccagggggaaacgcctggtatctttatagtcctgtcgggtttcgccacctctgacttgagcgtcgatttttgtgatgctc
gtcaggggggcggagcctatggaaaaacgccagcaacgcggcctttttacggttcctggccttttgctggccttttgctcacatgt
pAAV-U6gRNA(Lgi1-sa_sgRNA2)-shCaMKII-sadCas9-VP64 used in in vitro experiments (SEQ ID NO: 125) (the
sequence for shCaMKII is represented by ″[XXX]″)
cctgcaggcagctgcgcgctcgctcgctcactgaggccgcccgggcaaagcccgggcgtcgggcgacctttggtcgcccggcctcagtgagcgagcgagcgcg
cagagagggagtggccaactccatcactaggggttcctgcggccgcacgcgtggtaccgagggcctatttcccatgattccttcatatttgcatatacgatacaaggct
gttagagagataattggaattaatttgactgtaaacacaaagatattagtacaaaatacgtgacgtagaaagtaataatttcttgggtagtttgcagttttaaaattatgtttt
aaaatggactatcatatgcttaccgtaacttgaaagtatttcgatttcttggctttatatatcttgtggaaaggacgaaacaccgCACTGCTGGGGGAAGAGA
CCTgttttagtactctggaaacagaatctactaaaacaaggcaaaatgccgtgtttatctcgtcaacttgttggcgagatttttgcgacgcgtAATTccacggggttA
ATCGAA[XXX]gatatcgAATTCGGTACCACCGGTgccaccatggccccaaagaagaagcggaaggtcggtatccacggagtcccagcagcca
agcggaactacatcctgggcctggccatcggcatcaccagcgtgggctacggcatcatcgactacgagacacgggacgtgatcgatgccggcgtgcggctgttca
aagaggccaacgtggaaaacaacgagggcaggcggagcaagagaggcgccagaaggctgaagcggcggaggcggcatagaatccagagagtgaagaa
gctgctgttcgactacaacctgctgaccgaccacagcgagctgagcggcatcaacccctacgaggccagagtgaagggcctgagccagaagctgagcgaggaa
gagttctctgccgccctgctgcacctggccaagagaagaggcgtgcacaacgtgaacgaggtggaagaggacaccggcaacgagctgtccaccaaagagcag
atcagccggaacagcaaggccctggaagagaaatacgtggccgaactgcagctggaacggctgaagaaagacggcgaagtgcggggcagcatcaacagatt
caagaccagcgactacgtgaaagaagccaaacagctgctgaaggtgcagaaggcctaccaccagctggaccagagcttcatcgacacctacatcgacctgctg
gaaacccggcggacctactatgagggacctggcgagggcagccccttcggctggaaggacatcaaagaatggtacgagatgctgatgggccactgcacctactt
ccccgaggaactgcggagcgtgaagtacgcctacaacgccgacctgtacaacgccctgaacgacctgaacaatctcgtgatcaccagggacgagaacgagaa
gctggaatattacgagaagttccagatcatcgagaacgtgttcaagcagaagaagaagcccaccctgaagcagatcgccaaagaaatcctcgtgaacgaagag
gatattaagggctacagagtgaccagcaccggcaagcccgagttcaccaacctgaaggtgtaccacgacatcaaggacattaccgcccggaaagagattattga
gaacgccgagctgctggatcagattgccaagatcctgaccatctaccagagcagcgaggacatccaggaagaactgaccaatctgaactccgagctgacccagg
aagagatcgagcagatctctaatctgaagggctataccggcacccacaacctgagcctgaaggccatcaacctgatcctggacgagctgtggcacaccaacgac
aaccagatcgctatcttcaaccggctgaagctggtgcccaagaaggtggacctgtcccagcagaaagagatccccaccaccctggtggacgacttcatcctgagc
cccgtcgtgaagagaagcttcatccagagcatcaaagtgatcaacgccatcatcaagaagtacggcctgcccaacgacatcattatcgagctggcccgcgagaag
aactccaaggacgcccagaaaatgatcaacgagatgcagaagcggaaccggcagaccaacgagcggatcgaggaaatcatccggaccaccggcaaagag
aacgccaagtacctgatcgagaagatcaagctgcacgacatgcaggaaggcaagtgcctgtacagcctggaagccatccctctggaagatctgctgaacaaccc
cttcaactatgaggtggaccacatcatccccagaagcgtgtccttcgacaacagcttcaacaacaaggtgctcgtgaagcaggaagaagccagcaagaagggca
accggaccccattccagtacctgagcagcagcgacagcaagatcagctacgaaaccttcaagaagcacatcctgaatctggccaagggcaagggcagaatcag
caagaccaagaaagagtatctgctggaagaacgggacatcaacaggttctccgtgcagaaagacttcatcaaccggaacctggtggataccagatacgccacca
gaggcctgatgaacctgctgcggagctacttcagagtgaacaacctggacgtgaaagtgaagtccatcaatggcggcttcaccagctttctgcggcggaagtggaa
gtttaagaaagagcggaacaaggggtacaagcaccacgccgaggacgccctgatcattgccaacgccgatttcatcttcaaagagtggaagaaactggacaag
gccaaaaaagtgatggaaaaccagatgttcgaggaaaagcaggccgagagcatgcccgagatcgaaaccgagcaggagtacaaagagatcttcatcacccc
ccaccagatcaagcacattaaggacttcaaggactacaagtacagccaccgggggacaagaagcctaatagagagctgattaacgacaccctgtactccaccc
ggaaggacgacaagggcaacaccctgatcgtgaacaatctgaacggcctgtacgacaaggacaatgacaagctgaaaaagctgatcaacaagagccccgaa
aagctgctgatgtaccaccacgacccccagacctaccagaaactgaagctgattatggaacagtacggcgacgagaagaatcccctgtacaagtactacgagga
aaccgggaactacctgaccaagtactccaaaaaggacaacggccccgtgatcaagaagattaagtattacggcaacaaactgaacgcccatctggacatcacc
gacgactaccccaacagcagaaacaaggtcgtgaagctgtccctgaagccctacagattcgacgtgtacctggacaatggcgtgtacaagttcgtgaccgtgaag
aatctggatgtgatcaaaaaagaaaactactacgaagtgaatagcaagtgctatgaggaagctaagaagctgaagaagatcagcaaccaggccgagtttatcgc
ctccttctacaacaacgatctgatcaagatcaacggcgagctgtatagagtgatcggcgtgaacaacgacctgctgaaccggatcgaagtgaacatgatcgacatc
acctaccgcgagtacctggaaaacatgaacgacaagaggccccccaggatcattaagacaatcgcctccaagacccagagcattaagaagtacagcacagac
attctgggcaacctgtatgaagtgaaatctaagaagcaccctcagatcatcaaaaagggcaaaaggccggcggccacgaaaaaggccggccaggcaaaaaa
gaaaaagggatccgaggccagcggttccggacgggctgacgcattggacgattttgatctggatatgctgggaagtgacgccctcgatgattttgaccttgacatgctt
ggttcggatgcccttgatgactttgacctcgacatgctcggcagtgacgcccttgatgatttcgacctggacatgctgattaactcaagatgatctagacatatggatatct
gactagtctcgagtttattgcagcttataatggttacaaataaagcaatagcatcacaaatttcacaaataaagcatttttttcactggaccgagcggccgcaggaaccc
ctagtgatggagttggccactccctctctgcgcgctcgctcgctcactgaggccgggcgaccaaaggtcgcccgacgcccgggctttgcccgggcggcctcagtga
gcgagcgagcgcgcagctgcctgcaggggcgcctgatgcggtattttctccttacgcatctgtgcggtatttcacaccgcatacgtcaaagcaaccatagtacgcgcc
ctgtagcggcgcattaagcgcggcgggtgtggtggttacgcgcagcgtgaccgctacacttgccagcgccctagcgcccgctcctttcgctttcttcccttcctttctcgcc
acgttcgccggctttccccgtcaagctctaaatcgggggctccctttagggttccgatttagtgctttacggcacctcgaccccaaaaaacttgatttgggtgatggttcac
gtagtgggccatcgccctgatagacggtttttcgccctttgacgttggagtccacgttctttaatagtggactcttgttccaaactggaacaacactcaaccctatctcgggc
tattcttttgatttataagggattttgccgatttcggcctattggttaaaaaatgagctgatttaacaaaaatttaacgcgaattttaacaaaatattaacgtttacaattttatggt
gcactctcagtacaatctgctctgatgccgcatagttaagccagccccgacacccgccaacacccgctgacgcgccctgacgggcttgtctgctcccggcatccgctt
acagacaagctgtgaccgtctccgggagctgcatgtgtcagaggttttcaccgtcatcaccgaaacgcgcgagacgaaagggcctcgtgatacgcctatttttatagg
ttaatgtcatgataataatggtttcttagacgtcaggtggcacttttcggggaaatgtgcgcggaacccctatttgtttatttttctaaatacattcaaatatgtatccgctcatg
agacaataaccctgataaatgcttcaataatattgaaaaaggaagagtatgagtattcaacatttccgtgtcgcccttattcccttttttgcggcattttgccttcctgtttttgct
cacccagaaacgctggtgaaagtaaaagatgctgaagatcagttgggtgcacgagtgggttacatcgaactggatctcaacagcggtaagatccttgagagttttcg
ccccgaagaacgttttccaatgatgagcacttttaaagttctgctatgtggcgcggtattatcccgtattgacgccgggcaagagcaactcggtcgccgcatacactatt
ctcagaatgacttggttgagtactcaccagtcacagaaaagcatcttacggatggcatgacagtaagagaattatgcagtgctgccataaccatgagtgataacactg
cggccaacttacttctgacaacgatcggaggaccgaaggagctaaccgcttttttgcacaacatgggggatcatgtaactcgccttgatcgttgggaaccggagctga
atgaagccataccaaacgacgagcgtgacaccacgatgcctgtagcaatggcaacaacgttgcgcaaactattaactggcgaactacttactctagcttcccggca
acaattaatagactggatggaggcggataaagttgcaggaccacttctgcgctcggcccttccggctggctggtttattgctgataaatctggagccggtgagcgtggg
tctcgcggtatcattgcagcactggggccagatggtaagccctcccgtatcgtagttatctacacgacggggagtcaggcaactatggatgaacgaaatagacagat
cgctgagataggtgcctcactgattaagcattggtaactgtcagaccaagtttactcatatatactttagattgatttaaaacttcattittaatttaaaaggatctaggtgaag
atcctttttgataatctcatgaccaaaatcccttaacgtgagttttcgttccactgagcgtcagaccccgtagaaaagatcaaaggatcttcttgagatcctttttttctgcgcg
taatctgctgcttgcaaacaaaaaaaccaccgctaccagcggtggtttgtttgccggatcaagagctaccaactctttttccgaaggtaactggcttcagcagagcgca
gataccaaatactgtccttctagtgtagccgtagttaggccaccacttcaagaactctgtagcaccgcctacatacctcgctctgctaatcctgttaccagtggctgctgcc
agtggcgataagtcgtgtcttaccgggttggactcaagacgatagttaccggataaggcgcagcggtcgggctgaacggggggttcgtgcacacagcccagcttgg
agcgaacgacctacaccgaactgagatacctacagcgtgagctatgagaaagcgccacgcttcccgaagggagaaaggcggacaggtatccggtaagcggca
gggtcggaacaggagagcgcacgagggagcttccagggggaaacgcctggtatctttatagtcctgtcgggtttcgccacctctgacttgagcgtcgatttttgtgatg
ctcgtcaggggggcggagcctatggaaaaacgccagcaacgcggcctttttacggttcctggccttttgctggccttttgctcacatgt
pAAV-U6gRNA(Kcnq2-sa_sgRNA6)-shCaMKII-sadCas9-VP64 used in in vitro experiments (SEQ ID NO: 126)
(the sequence for shCaMKII is represented by ″[XXX]″)
cctgcaggcagctgcgcgctcgctcgctcactgaggccgcccgggcaaagcccgggcgtcgggcgacctttggtcgcccggcctcagtgagcgagcgagcgcg
cagagagggagtggccaactccatcactaggggttcctgcggccgcacgcgtggtaccgagggcctatttcccatgattccttcatatttgcatatacgatacaaggct
gttagagagataattggaattaatttgactgtaaacacaaagatattagtacaaaatacgtgacgtagaaagtaataatttcttgggtagtttgcagttttaaaattatgtttt
aaaatggactatcatatgcttaccgtaacttgaaagtatttcgatttcttggctttatatatcttgtggaaaggacgaaacaccTCCTAGCCCGGTAATCCTT
GAgttttagtactctggaaacagaatctactaaaacaaggcaaaatgccgtgtttatctcgtcaacttgttggcgagatttttgcgacgcgtAATTccacggggttAA
TCGAA[XXX]gatatcgAATTCGGTACCACCGGTgccaccatggccccaaagaagaagcggaaggtcggtatccacggagtcccagcagccaa
gcggaactacatcctgggcctggccatcggcatcaccagcgtgggctacggcatcatcgactacgagacacgggacgtgatcgatgccggcgtgcggctgttcaa
agaggccaacgtggaaaacaacgagggcaggcggagcaagagaggcgccagaaggctgaagcggcggaggcggcatagaatccagagagtgaagaag
ctgctgttcgactacaacctgctgaccgaccacagcgagctgagcggcatcaacccctacgaggccagagtgaagggcctgagccagaagctgagcgaggaag
agttctctgccgccctgctgcacctggccaagagaagaggcgtgcacaacgtgaacgaggtggaagaggacaccggcaacgagctgtccaccaaagagcaga
tcagccggaacagcaaggccctggaagagaaatacgtggccgaactgcagctggaacggctgaagaaagacggcgaagtgcggggcagcatcaacagattc
aagaccagcgactacgtgaaagaagccaaacagctgctgaaggtgcagaaggcctaccaccagctggaccagagcttcatcgacacctacatcgacctgctgg
aaacccggcggacctactatgagggacctggcgagggcagccccttcggctggaaggacatcaaagaatggtacgagatgctgatgggccactgcacctacttc
cccgaggaactgcggagcgtgaagtacgcctacaacgccgacctgtacaacgccctgaacgacctgaacaatctcgtgatcaccagggacgagaacgagaag
ctggaatattacgagaagttccagatcatcgagaacgtgttcaagcagaagaagaagcccaccctgaagcagatcgccaaagaaatcctcgtgaacgaagagg
atattaagggctacagagtgaccagcaccggcaagcccgagttcaccaacctgaaggtgtaccacgacatcaaggacattaccgcccggaaagagattattgag
aacgccgagctgctggatcagattgccaagatcctgaccatctaccagagcagcgaggacatccaggaagaactgaccaatctgaactccgagctgacccagga
agagatcgagcagatctctaatctgaagggctataccggcacccacaacctgagcctgaaggccatcaacctgatcctggacgagctgtggcacaccaacgaca
accagatcgctatcttcaaccggctgaagctggtgcccaagaaggtggacctgtcccagcagaaagagatccccaccaccctggtggacgacttcatcctgagccc
cgtcgtgaagagaagcttcatccagagcatcaaagtgatcaacgccatcatcaagaagtacggcctgcccaacgacatcattatcgagctggcccgcgagaaga
actccaaggacgcccagaaaatgatcaacgagatgcagaagcggaaccggcagaccaacgagcggatcgaggaaatcatccggaccaccggcaaagaga
acgccaagtacctgatcgagaagatcaagctgcacgacatgcaggaaggcaagtgcctgtacagcctggaagccatccctctggaagatctgctgaacaacccct
tcaactatgaggtggaccacatcatccccagaagcgtgtccttcgacaacagcttcaacaacaaggtgctcgtgaagcaggaagaagccagcaagaagggcaa
ccggaccccattccagtacctgagcagcagcgacagcaagatcagctacgaaaccttcaagaagcacatcctgaatctggccaagggcaagggcagaatcagc
aagaccaagaaagagtatctgctggaagaacgggacatcaacaggttctccgtgcagaaagacttcatcaaccggaacctggtggataccagatacgccaccag
aggcctgatgaacctgctgcggagctacttcagagtgaacaacctggacgtgaaagtgaagtccatcaatggcggcttcaccagctttctgcggcggaagtggaag
tttaagaaagagcggaacaaggggtacaagcaccacgccgaggacgccctgatcattgccaacgccgatttcatcttcaaagagtggaagaaactggacaagg
ccaaaaaagtgatggaaaaccagatgttcgaggaaaagcaggccgagagcatgcccgagatcgaaaccgagcaggagtacaaagagatcttcatcacccccc
accagatcaagcacattaaggacttcaaggactacaagtacagccaccgggggacaagaagcctaatagagagctgattaacgacaccctgtactccacccgg
aaggacgacaagggcaacaccctgatcgtgaacaatctgaacggcctgtacgacaaggacaatgacaagctgaaaaagctgatcaacaagagccccgaaaa
gctgctgatgtaccaccacgacccccagacctaccagaaactgaagctgattatggaacagtacggcgacgagaagaatcccctgtacaagtactacgaggaaa
ccgggaactacctgaccaagtactccaaaaaggacaacggccccgtgatcaagaagattaagtattacggcaacaaactgaacgcccatctggacatcaccgac
gactaccccaacagcagaaacaaggtcgtgaagctgtccctgaagccctacagattcgacgtgtacctggacaatggcgtgtacaagttcgtgaccgtgaagaatc
tggatgtgatcaaaaaagaaaactactacgaagtgaatagcaagtgctatgaggaagctaagaagctgaagaagatcagcaaccaggccgagtttatcgcctcct
tctacaacaacgatctgatcaagatcaacggcgagctgtatagagtgatcggcgtgaacaacgacctgctgaaccggatcgaagtgaacatgatcgacatcaccta
ccgcgagtacctggaaaacatgaacgacaagaggccccccaggatcattaagacaatcgcctccaagacccagagcattaagaagtacagcacagacattctg
ggcaacctgtatgaagtgaaatctaagaagcaccctcagatcatcaaaaagggcaaaaggccggcggccacgaaaaaggccggccaggcaaaaaagaaaa
agggatccgaggccagcggttccggacgggctgacgcattggacgattttgatctggatatgctgggaagtgacgccctcgatgattttgaccttgacatgcttggttcg
gatgcccttgatgactttgacctcgacatgctcggcagtgacgcccttgatgatttcgacctggacatgctgattaactcaagatgatctagacatatggatatctgactag
tctcgagtttattgcagcttataatggttacaaataaagcaatagcatcacaaatttcacaaataaagcatttttttcactggaccgagcggccgcaggaacccctagtg
atggagttggccactccctctctgcgcgctcgctcgctcactgaggccgggcgaccaaaggtcgcccgacgcccgggctttgcccgggcggcctcagtgagcgag
cgagcgcgcagctgcctgcaggggcgcctgatgcggtattttctccttacgcatctgtgcggtatttcacaccgcatacgtcaaagcaaccatagtacgcgccctgtag
cggcgcattaagcgcggcgggtgtggtggttacgcgcagcgtgaccgctacacttgccagcgccctagcgcccgctcctttcgctttcttcccttcctttctcgccacgttc
gccggctttccccgtcaagctctaaatcgggggctccctttagggttccgatttagtgctttacggcacctcgaccccaaaaaacttgatttgggtgatggttcacgtagtg
ggccatcgccctgatagacggtttttcgccctttgacgttggagtccacgttctttaatagtggactcttgttccaaactggaacaacactcaaccctatctcgggctattcttt
tgatttataagggattttgccgatttcggcctattggttaaaaaatgagctgatttaacaaaaatttaacgcgaattttaacaaaatattaacgtttacaattttatggtgcact
ctcagtacaatctgctctgatgccgcatagttaagccagccccgacacccgccaacacccgctgacgcgccctgacgggcttgtctgctcccggcatccgcttacag
acaagctgtgaccgtctccgggagctgcatgtgtcagaggttttcaccgtcatcaccgaaacgcgcgagacgaaagggcctcgtgatacgcctatttttataggttaat
gtcatgataataatggtttcttagacgtcaggtggcacttttcggggaaatgtgcgcggaacccctatttgtttatttttctaaatacattcaaatatgtatccgctcatgagac
aataaccctgataaatgcttcaataatattgaaaaaggaagagtatgagtattcaacatttccgtgtcgcccttattcccttttttgcggcattttgccttcctgtttttgctcacc
cagaaacgctggtgaaagtaaaagatgctgaagatcagttgggtgcacgagtgggttacatcgaactggatctcaacagcggtaagatccttgagagttttcgcccc
gaagaacgttttccaatgatgagcacttttaaagttctgctatgtggcgcggtattatcccgtattgacgccgggcaagagcaactcggtcgccgcatacactattctcag
aatgacttggttgagtactcaccagtcacagaaaagcatcttacggatggcatgacagtaagagaattatgcagtgctgccataaccatgagtgataacactgcggc
caacttacttctgacaacgatcggaggaccgaaggagctaaccgcttttttgcacaacatgggggatcatgtaactcgccttgatcgttgggaaccggagctgaatga
agccataccaaacgacgagcgtgacaccacgatgcctgtagcaatggcaacaacgttgcgcaaactattaactggcgaactacttactctagcttcccggcaacaa
ttaatagactggatggaggcggataaagttgcaggaccacttctgcgctcggcccttccggctggctggtttattgctgataaatctggagccggtgagcgtgggtctcg
cggtatcattgcagcactggggccagatggtaagccctcccgtatcgtagttatctacacgacggggagtcaggcaactatggatgaacgaaatagacagatcgct
gagataggtgcctcactgattaagcattggtaactgtcagaccaagtttactcatatatactttagattgatttaaaacttcatttttaatttaaaaggatctaggtgaagatcc
tttttgataatctcatgaccaaaatcccttaacgtgagttttcgttccactgagcgtcagaccccgtagaaaagatcaaaggatcttcttgagatcctttttttctgcgcgtaat
ctgctgcttgcaaacaaaaaaaccaccgctaccagcggtggtttgtttgccggatcaagagctaccaactctttttccgaaggtaactggcttcagcagagcgcagat
accaaatactgtccttctagtgtagccgtagttaggccaccacttcaagaactctgtagcaccgcctacatacctcgctctgctaatcctgttaccagtggctgctgccagt
ggcgataagtcgtgtcttaccgggttggactcaagacgatagttaccggataaggcgcagcggtcgggctgaacggggggttcgtgcacacagcccagcttggag
cgaacgacctacaccgaactgagatacctacagcgtgagctatgagaaagcgccacgcttcccgaagggagaaaggcggacaggtatccggtaagcggcagg
gtcggaacaggagagcgcacgagggagcttccagggggaaacgcctggtatctttatagtcctgtcgggtttcgccacctctgacttgagcgtcgatttttgtgatgctc
gtcaggggggcggagcctatggaaaaacgccagcaacgcggcctttttacggttcctggccttttgctggccttttgctcacatgt
pAAV-U6gRNA(Kcnq3-sa_sgRNA3)-shCaMKII-sadCas9-VP64 used in in vitro experiments (SEQ ID NO: 127)
(the sequence for shCaMKII is represented by ″[XXX]″)
cctgcaggcagctgcgcgctcgctcgctcactgaggccgcccgggcaaagcccgggcgtcgggcgacctttggtcgcccggcctcagtgagcgagcgagcgcg
cagagagggagtggccaactccatcactaggggttcctgcggccgcacgcgtggtaccgagggcctatttcccatgattccttcatatttgcatatacgatacaaggct
gttagagagataattggaattaatttgactgtaaacacaaagatattagtacaaaatacgtgacgtagaaagtaataatttcttgggtagtttgcagttttaaaattatgtttt
aaaatggactatcatatgcttaccgtaacttgaaagtatttcgatttcttggctttatatatcttgtggaaaggacgaaacaccCTACTGCCGCTGCAGCGGG
GCgttttagtactctggaaacagaatctactaaaacaaggcaaaatgccgtgtttatctcgtcaacttgttggcgagatttttgcgacgcgtAATTccacggggttAA
TCGAA[XXX]gatatcgAATTCGGTACCACCGGTgccaccatggccccaaagaagaagcggaaggtcggtatccacggagtcccagcagccaa
gcggaactacatcctgggcctggccatcggcatcaccagcgtgggctacggcatcatcgactacgagacacgggacgtgatcgatgccggcgtgcggctgttcaa
agaggccaacgtggaaaacaacgagggcaggcggagcaagagaggcgccagaaggctgaagcggcggaggcggcatagaatccagagagtgaagaag
ctgctgttcgactacaacctgctgaccgaccacagcgagctgagcggcatcaacccctacgaggccagagtgaagggcctgagccagaagctgagcgaggaag
agttctctgccgccctgctgcacctggccaagagaagaggcgtgcacaacgtgaacgaggtggaagaggacaccggcaacgagctgtccaccaaagagcaga
tcagccggaacagcaaggccctggaagagaaatacgtggccgaactgcagctggaacggctgaagaaagacggcgaagtgcggggcagcatcaacagattc
aagaccagcgactacgtgaaagaagccaaacagctgctgaaggtgcagaaggcctaccaccagctggaccagagcttcatcgacacctacatcgacctgctgg
aaacccggcggacctactatgagggacctggcgagggcagccccttcggctggaaggacatcaaagaatggtacgagatgctgatgggccactgcacctacttc
cccgaggaactgcggagcgtgaagtacgcctacaacgccgacctgtacaacgccctgaacgacctgaacaatctcgtgatcaccagggacgagaacgagaag
ctggaatattacgagaagttccagatcatcgagaacgtgttcaagcagaagaagaagcccaccctgaagcagatcgccaaagaaatcctcgtgaacgaagagg
atattaagggctacagagtgaccagcaccggcaagcccgagttcaccaacctgaaggtgtaccacgacatcaaggacattaccgcccggaaagagattattgag
aacgccgagctgctggatcagattgccaagatcctgaccatctaccagagcagcgaggacatccaggaagaactgaccaatctgaactccgagctgacccagga
agagatcgagcagatctctaatctgaagggctataccggcacccacaacctgagcctgaaggccatcaacctgatcctggacgagctgtggcacaccaacgaca
accagatcgctatcttcaaccggctgaagctggtgcccaagaaggtggacctgtcccagcagaaagagatccccaccaccctggtggacgacttcatcctgagccc
cgtcgtgaagagaagcttcatccagagcatcaaagtgatcaacgccatcatcaagaagtacggcctgcccaacgacatcattatcgagctggcccgcgagaaga
actccaaggacgcccagaaaatgatcaacgagatgcagaagcggaaccggcagaccaacgagcggatcgaggaaatcatccggaccaccggcaaagaga
acgccaagtacctgatcgagaagatcaagctgcacgacatgcaggaaggcaagtgcctgtacagcctggaagccatccctctggaagatctgctgaacaacccct
tcaactatgaggtggaccacatcatccccagaagcgtgtccttcgacaacagcttcaacaacaaggtgctcgtgaagcaggaagaagccagcaagaagggcaa
ccggaccccattccagtacctgagcagcagcgacagcaagatcagctacgaaaccttcaagaagcacatcctgaatctggccaagggcaagggcagaatcagc
aagaccaagaaagagtatctgctggaagaacgggacatcaacaggttctccgtgcagaaagacttcatcaaccggaacctggtggataccagatacgccaccag
aggcctgatgaacctgctgcggagctacttcagagtgaacaacctggacgtgaaagtgaagtccatcaatggcggcttcaccagctttctgcggcggaagtggaag
tttaagaaagagcggaacaaggggtacaagcaccacgccgaggacgccctgatcattgccaacgccgatttcatcttcaaagagtggaagaaactggacaagg
ccaaaaaagtgatggaaaaccagatgttcgaggaaaagcaggccgagagcatgcccgagatcgaaaccgagcaggagtacaaagagatcttcatcacccccc
accagatcaagcacattaaggacttcaaggactacaagtacagccaccgggggacaagaagcctaatagagagctgattaacgacaccctgtactccacccgg
aaggacgacaagggcaacaccctgatcgtgaacaatctgaacggcctgtacgacaaggacaatgacaagctgaaaaagctgatcaacaagagccccgaaaa
gctgctgatgtaccaccacgacccccagacctaccagaaactgaagctgattatggaacagtacggcgacgagaagaatcccctgtacaagtactacgaggaaa
ccgggaactacctgaccaagtactccaaaaaggacaacggccccgtgatcaagaagattaagtattacggcaacaaactgaacgcccatctggacatcaccgac
gactaccccaacagcagaaacaaggtcgtgaagctgtccctgaagccctacagattcgacgtgtacctggacaatggcgtgtacaagttcgtgaccgtgaagaatc
tggatgtgatcaaaaaagaaaactactacgaagtgaatagcaagtgctatgaggaagctaagaagctgaagaagatcagcaaccaggccgagtttatcgcctcct
tctacaacaacgatctgatcaagatcaacggcgagctgtatagagtgatcggcgtgaacaacgacctgctgaaccggatcgaagtgaacatgatcgacatcaccta
ccgcgagtacctggaaaacatgaacgacaagaggccccccaggatcattaagacaatcgcctccaagacccagagcattaagaagtacagcacagacattctg
ggcaacctgtatgaagtgaaatctaagaagcaccctcagatcatcaaaaagggcaaaaggccggcggccacgaaaaaggccggccaggcaaaaaagaaaa
agggatccgaggccagcggttccggacgggctgacgcattggacgattttgatctggatatgctgggaagtgacgccctcgatgattttgaccttgacatgcttggttcg
gatgcccttgatgactttgacctcgacatgctcggcagtgacgcccttgatgatttcgacctggacatgctgattaactcaagatgatctagacatatggatatctgactag
tctcgagtttattgcagcttataatggttacaaataaagcaatagcatcacaaatttcacaaataaagcatttttttcactggaccgagcggccgcaggaacccctagtg
atggagttggccactccctctctgcgcgctcgctcgctcactgaggccgggcgaccaaaggtcgcccgacgcccgggctttgcccgggcggcctcagtgagcgag
cgagcgcgcagctgcctgcaggggcgcctgatgcggtattttctccttacgcatctgtgcggtatttcacaccgcatacgtcaaagcaaccatagtacgcgccctgtag
cggcgcattaagcgcggcgggtgtggtggttacgcgcagcgtgaccgctacacttgccagcgccctagcgcccgctcctttcgctttcttcccttcctttctcgccacgttc
gccggctttccccgtcaagctctaaatcgggggctccctttagggttccgatttagtgctttacggcacctcgaccccaaaaaacttgatttgggtgatggttcacgtagtg
ggccatcgccctgatagacggtttttcgccctttgacgttggagtccacgttctttaatagtggactcttgttccaaactggaacaacactcaaccctatctcgggctattcttt
tgatttataagggattttgccgatttcggcctattggttaaaaaatgagctgatttaacaaaaatttaacgcgaattttaacaaaatattaacgtttacaattttatggtgcact
ctcagtacaatctgctctgatgccgcatagttaagccagccccgacacccgccaacacccgctgacgcgccctgacgggcttgtctgctcccggcatccgcttacag
acaagctgtgaccgtctccgggagctgcatgtgtcagaggttttcaccgtcatcaccgaaacgcgcgagacgaaagggcctcgtgatacgcctatttttataggttaat
gtcatgataataatggtttcttagacgtcaggtggcacttttcggggaaatgtgcgcggaacccctatttgtttatttttctaaatacattcaaatatgtatccgctcatgagac
aataaccctgataaatgcttcaataatattgaaaaaggaagagtatgagtattcaacatttccgtgtcgcccttattcccttttttgcggcattttgccttcctgtttttgctcacc
cagaaacgctggtgaaagtaaaagatgctgaagatcagttgggtgcacgagtgggttacatcgaactggatctcaacagcggtaagatccttgagagttttcgcccc
gaagaacgttttccaatgatgagcacttttaaagttctgctatgtggcgcggtattatcccgtattgacgccgggcaagagcaactcggtcgccgcatacactattctcag
aatgacttggttgagtactcaccagtcacagaaaagcatcttacggatggcatgacagtaagagaattatgcagtgctgccataaccatgagtgataacactgcggc
caacttacttctgacaacgatcggaggaccgaaggagctaaccgcttttttgcacaacatgggggatcatgtaactcgccttgatcgttgggaaccggagctgaatga
agccataccaaacgacgagcgtgacaccacgatgcctgtagcaatggcaacaacgttgcgcaaactattaactggcgaactacttactctagcttcccggcaacaa
ttaatagactggatggaggcggataaagttgcaggaccacttctgcgctcggcccttccggctggctggtttattgctgataaatctggagccggtgagcgtgggtctcg
cggtatcattgcagcactggggccagatggtaagccctcccgtatcgtagttatctacacgacggggagtcaggcaactatggatgaacgaaatagacagatcgct
gagataggtgcctcactgattaagcattggtaactgtcagaccaagtttactcatatatactttagattgatttaaaacttcatttttaatttaaaaggatctaggtgaagatcc
tttttgataatctcatgaccaaaatcccttaacgtgagttttcgttccactgagcgtcagaccccgtagaaaagatcaaaggatcttcttgagatcctttttttctgcgcgtaat
ctgctgcttgcaaacaaaaaaaccaccgctaccagcggtggtttgtttgccggatcaagagctaccaactctttttccgaaggtaactggcttcagcagagcgcagat
accaaatactgtccttctagtgtagccgtagttaggccaccacttcaagaactctgtagcaccgcctacatacctcgctctgctaatcctgttaccagtggctgctgccagt
ggcgataagtcgtgtcttaccgggttggactcaagacgatagttaccggataaggcgcagcggtcgggctgaacggggggttcgtgcacacagcccagcttggag
cgaacgacctacaccgaactgagatacctacagcgtgagctatgagaaagcgccacgcttcccgaagggagaaaggcggacaggtatccggtaagcggcagg
gtcggaacaggagagcgcacgagggagcttccagggggaaacgcctggtatctttatagtcctgtcgggtttcgccacctctgacttgagcgtcgatttttgtgatgctc
gtcaggggggcggagcctatggaaaaacgccagcaacgcggcctttttacggttcctggccttttgctggccttttgctcacatgt
pAAV-U6gRNA(Kcna2-sa_sgRNA2)-U6gRNA(Lgi1-sa_sgRNA_-shCaMKII-sadCas9-VP64 used in vitro
experiments (SEQ ID NO: 128)(the sequence for shCaMKII is represented by ″[XXX]″)
cctgcaggcagctgcgcgctcgctcgctcactgaggccgcccgggcaaagcccgggcgtcgggcgacctttggtcgcccggcctcagtgagcgagcgagcgcg
cagagagggagtggccaactccatcactaggggttcctgcggccgcacgcgtgagggcctatttcccatgattccttcatatttgcatatacgatacaaggctgttaga
gagataattggaattaatttgactgtaaacacaaagatattagtacaaaatacgtgacgtagaaagtaataatttcttgggtagtttgcagttttaaaattatgttttaaaatg
gactatcatatgcttaccgtaacttgaaagtatttcgatttcttggctttatatatcttgtggaaaggacgaaacaccGCCCCAGCCGGCCCCTTTAATgtttt
agtactctggaaacagaatctactaaaacaaggcaaaatgccgtgtttatctcgtcaacttgttggcgagatttttGGGCCCgagggcctatttcccatgattccttcat
atttgcatatacgatacaaggctgttagagagataattggaattaatttgactgtaaacacaaagatattagtacaaaatacgtgacgtagaaagtaataatttcttgggt
agtttgcagttttaaaattatgttttaaaatggactatcatatgcttaccgtaacttgaaagtatttcgatttcttggctttatatatcttgtggaaaggacgaaacaccgCACT
GCTGGGGGAAGAGACCTgttttagtactctggaaacagaatctactaaaacaaggcaaaatgccgtgtttatctcgtcaacttgttggcgagatttttGCTA
GC[XXX]gAATTCGGTACCACCGGTgccaccatggccccaaagaagaagcggaaggtcggtatccacggagtcccagcagccaagcggaactac
atcctgggcctggccatcggcatcaccagcgtgggctacggcatcatcgactacgagacacgggacgtgatcgatgccggcgtgcggctgttcaaagaggccaac
gtggaaaacaacgagggcaggcggagcaagagaggcgccagaaggctgaagcggggaggcggcatagaatccagagagtgaagaagctgctgttcgact
acaacctgctgaccgaccacagcgagctgagcggcatcaacccctacgaggccagagtgaagggcctgagccagaagctgagcgaggaagagttctctgccg
ccctgctgcacctggccaagagaagaggcgtgcacaacgtgaacgaggtggaagaggacaccggcaacgagctgtccaccaaagagcagatcagccggaa
cagcaaggccctggaagagaaatacgtggccgaactgcagctggaacggctgaagaaagacggcgaagtgcggggcagcatcaacagattcaagaccagc
gactacgtgaaagaagccaaacagctgctgaaggtgcagaaggcctaccaccagctggaccagagcttcatcgacacctacatcgacctgctggaaacccggc
ggacctactatgagggacctggcgagggcagccccttcggctggaaggacatcaaagaatggtacgagatgctgatgggccactgcacctacttccccgaggaa
ctgcggagcgtgaagtacgcctacaacgccgacctgtacaacgccctgaacgacctgaacaatctcgtgatcaccagggacgagaacgagaagctggaatatta
cgagaagttccagatcatcgagaacgtgttcaagcagaagaagaagcccaccctgaagcagatcgccaaagaaatcctcgtgaacgaagaggatattaagggc
tacagagtgaccagcaccggcaagcccgagttcaccaacctgaaggtgtaccacgacatcaaggacattaccgcccggaaagagattattgagaacgccgagc
tgctggatcagattgccaagatcctgaccatctaccagagcagcgaggacatccaggaagaactgaccaatctgaactccgagctgacccaggaagagatcgag
cagatctctaatctgaagggctataccggcacccacaacctgagcctgaaggccatcaacctgatcctggacgagctgtggcacaccaacgacaaccagatcgct
atcttcaaccggctgaagctggtgcccaagaaggtggacctgtcccagcagaaagagatccccaccaccctggtggacgacttcatcctgagccccgtcgtgaag
agaagcttcatccagagcatcaaagtgatcaacgccatcatcaagaagtacggcctgcccaacgacatcattatcgagctggcccgcgagaagaactccaagga
cgcccagaaaatgatcaacgagatgcagaagcggaaccggcagaccaacgagcggatcgaggaaatcatccggaccaccggcaaagagaacgccaagta
cctgatcgagaagatcaagctgcacgacatgcaggaaggcaagtgcctgtacagcctggaagccatccctctggaagatctgctgaacaaccccttcaactatga
ggtggaccacatcatccccagaagcgtgtccttcgacaacagcttcaacaacaaggtgctcgtgaagcaggaagaagccagcaagaagggcaaccggacccc
attccagtacctgagcagcagcgacagcaagatcagctacgaaaccttcaagaagcacatcctgaatctggccaagggcaagggcagaatcagcaagaccaa
gaaagagtatctgctggaagaacgggacatcaacaggttctccgtgcagaaagacttcatcaaccggaacctggtggataccagatacgccaccagaggcctgat
gaacctgctgcggagctacttcagagtgaacaacctggacgtgaaagtgaagtccatcaatggcggcttcaccagctttctgcggcggaagtggaagtttaagaaa
gagcggaacaaggggtacaagcaccacgccgaggacgccctgatcattgccaacgccgatttcatcttcaaagagtggaagaaactggacaaggccaaaaaa
gtgatggaaaaccagatgttcgaggaaaagcaggccgagagcatgcccgagatcgaaaccgagcaggagtacaaagagatcttcatcaccccccaccagatc
aagcacattaaggacttcaaggactacaagtacagccaccgggtggacaagaagcctaatagagagctgattaacgacaccctgtactccacccggaaggacg
acaagggcaacaccctgatcgtgaacaatctgaacggcctgtacgacaaggacaatgacaagctgaaaaagctgatcaacaagagccccgaaaagctgctgat
gtaccaccacgacccccagacctaccagaaactgaagctgattatggaacagtacggcgacgagaagaatcccctgtacaagtactacgaggaaaccgggaa
ctacctgaccaagtactccaaaaaggacaacggccccgtgatcaagaagattaagtattacggcaacaaactgaacgcccatctggacatcaccgacgactacc
ccaacagcagaaacaaggtcgtgaagctgtccctgaagccctacagattcgacgtgtacctggacaatggcgtgtacaagttcgtgaccgtgaagaatctggatgt
gatcaaaaaagaaaactactacgaagtgaatagcaagtgctatgaggaagctaagaagctgaagaagatcagcaaccaggccgagtttatcgcctccttctacaa
caacgatctgatcaagatcaacggcgagctgtatagagtgatcggcgtgaacaacgacctgctgaaccggatcgaagtgaacatgatcgacatcacctaccgcga
gtacctggaaaacatgaacgacaagaggccccccaggatcattaagacaatcgcctccaagacccagagcattaagaagtacagcacagacattctgggcaac
ctgtatgaagtgaaatctaagaagcaccctcagatcatcaaaaagggcaaaaggccggcggccacgaaaaaggccggccaggcaaaaaagaaaaagggat
ccgaggccagcggttccggacgggctgacgcattggacgattttgatctggatatgctgggaagtgacgccctcgatgattttgaccttgacatgcttggttcggatgcc
cttgatgactttgacctcgacatgctcggcagtgacgcccttgatgatttcgacctggacatgctgattaactcaagatgatctagacatatggatatctgactagtctcga
gtttattgcagcttataatggttacaaataaagcaatagcatcacaaatttcacaaataaagcatttttttcactggaccgagcggccgcaggaacccctagtgatggag
ttggccactccctctctgcgcgctcgctcgctcactgaggccgggcgaccaaaggtcgcccgacgcccgggctttgcccgggggcctcagtgagcgagcgagcg
cgcagctgcctgcaggggcgcctgatgcggtattttctccttacgcatctgtgcggtatttcacaccgcatacgtcaaagcaaccatagtacgcgccctgtagcggcgc
attaagcgcggcgggtgtggtggttacgcgcagcgtgaccgctacacttgccagcgccctagcgcccgctcctttcgctttcttcccttcctttctcgccacgttcgccggc
tttccccgtcaagctctaaatcgggggctccctttagggttccgatttagtgctttacggcacctcgaccccaaaaaacttgatttgggtgatggttcacgtagtgggccat
cgccctgatagacggtttttcgccctttgacgttggagtccacgttctttaatagtggactcttgttccaaactggaacaacactcaaccctatctcgggctattcttttgattta
taagggattttgccgatttcggcctattggttaaaaaatgagctgatttaacaaaaatttaacgcgaattttaacaaaatattaacgtttacaattttatggtgcactctcagta
caatctgctctgatgccgcatagttaagccagccccgacacccgccaacacccgctgacgcgccctgacgggcttgtctgctcccggcatccgcttacagacaagct
gtgaccgtctccgggagctgcatgtgtcagaggttttcaccgtcatcaccgaaacgcgcgagacgaaagggcctcgtgatacgcctatttttataggttaatgtcatgat
aataatggtttcttagacgtcaggtggcacttttcggggaaatgtgcgcggaacccctatttgtttatttttctaaatacattcaaatatgtatccgctcatgagacaataacc
ctgataaatgcttcaataatattgaaaaaggaagagtatgagtattcaacatttccgtgtcgcccttattcccttttttgcggcattttgccttcctgtttttgctcacccagaaac
gctggtgaaagtaaaagatgctgaagatcagttgggtgcacgagtgggttacatcgaactggatctcaacagcggtaagatccttgagagttttcgccccgaagaac
gttttccaatgatgagcacttttaaagttctgctatgtggcgcggtattatcccgtattgacgccgggcaagagcaactcggtcgccgcatacactattctcagaatgactt
ggttgagtactcaccagtcacagaaaagcatcttacggatggcatgacagtaagagaattatgcagtgctgccataaccatgagtgataacactgcggccaacttac
ttctgacaacgatcggaggaccgaaggagctaaccgcttttttgcacaacatgggggatcatgtaactcgccttgatcgttgggaaccggagctgaatgaagccata
ccaaacgacgagcgtgacaccacgatgcctgtagcaatggcaacaacgttgcgcaaactattaactggcgaactacttactctagcttcccggcaacaattaatag
actggatggaggcggataaagttgcaggaccacttctgcgctcggcccttccggctggctggtttattgctgataaatctggagccggtgagcgtgggtctcgcggtatc
attgcagcactggggccagatggtaagccctcccgtatcgtagttatctacacgacggggagtcaggcaactatggatgaacgaaatagacagatcgctgagatag
gtgcctcactgattaagcattggtaactgtcagaccaagtttactcatatatactttagattgatttaaaacttcattittaatttaaaaggatctaggtgaagatcctttttgata
atctcatgaccaaaatcccttaacgtgagttttcgttccactgagcgtcagaccccgtagaaaagatcaaaggatcttcttgagatcctttttttctgcgcgtaatctgctgct
tgcaaacaaaaaaaccaccgctaccagcggtggtttgtttgccggatcaagagctaccaactctttttccgaaggtaactggcttcagcagagcgcagataccaaat
actgtccttctagtgtagccgtagttaggccaccacttcaagaactctgtagcaccgcctacatacctcgctctgctaatcctgttaccagtggctgctgccagtggcgat
aagtcgtgtcttaccgggttggactcaagacgatagttaccggataaggcgcagcggtcgggctgaacggggggttcgtgcacacagcccagcttggagcgaacg
acctacaccgaactgagatacctacagcgtgagctatgagaaagcgccacgcttcccgaagggagaaaggcggacaggtatccggtaagcggcagggtcgga
acaggagagcgcacgagggagcttccagggggaaacgcctggtatctttatagtcctgtcgggtttcgccacctctgacttgagcgtcgatttttgtgatgctcgtcagg
ggggcggagcctatggaaaaacgccagcaacgcggcctttttacggttcctggccttttgctggccttttgctcacatgt
pAAV-U6gRNA(Kcnq2-sa_sgRNA6)-U6gRNA(Kcnq3-sa_sgRNA3)-shCaMKII-sadCas9-VP64 used in vitro
experiments (SEQ ID NO: 129)
cctgcaggcagctgcgcgctcgctcgctcactgaggccgcccgggcaaagcccgggcgtcgggcgacctttggtcgcccggcctcagtgagcgagcgagcgcg
cagagagggagtggccaactccatcactaggggttcctgcggccgcacgcgtgagggcctatttcccatgattccttcatatttgcatatacgatacaaggctgttaga
gagataattggaattaatttgactgtaaacacaaagatattagtacaaaatacgtgacgtagaaagtaataatttcttgggtagtttgcagttttaaaattatgttttaaaatg
gactatcatatgcttaccgtaacttgaaagtatttcgatttcttggctttatatatcttgtggaaaggacgaaacaccTCCTAGCCCGGTAATCCTTGAgtttta
gtactctggaaacagaatctactaaaacaaggcaaaatgccgtgtttatctcgtcaacttgttggcgagattttttGGGCCCgagggcctatttcccatgattccttcat
atttgcatatacgatacaaggctgttagagagataattggaattaatttgactgtaaacacaaagatattagtacaaaatacgtgacgtagaaagtaataatttcttgggt
agtttgcagttttaaaattatgttttaaaatggactatcatatgcttaccgtaacttgaaagtatttcgatttcttggctttatatatcttgtggaaaggacgaaacaccgCTAC
TGCCGCTGCAGCGGGGCgttttagtactctggaaacagaatctactaaaacaaggcaaaatgccgtgtttatctcgtcaacttgttggcgagattttttGCT
AGC[XXX]gAATTCGGTACCACCGGTgccaccatggccccaaagaagaagcggaaggtcggtatccacggagtcccagcagccaagcggaact
acatcctgggcctggccatcggcatcaccagcgtgggctacggcatcatcgactacgagacacgggacgtgatcgatgccggcgtgcggctgttcaaagaggcca
acgtggaaaacaacgagggcaggcggagcaagagaggcgccagaaggctgaagcggcggaggcggcatagaatccagagagtgaagaagctgctgttcg
actacaacctgctgaccgaccacagcgagctgagcggcatcaacccctacgaggccagagtgaagggcctgagccagaagctgagcgaggaagagttctctgc
cgccctgctgcacctggccaagagaagaggcgtgcacaacgtgaacgaggtggaagaggacaccggcaacgagctgtccaccaaagagcagatcagccgg
aacagcaaggccctggaagagaaatacgtggccgaactgcagctggaacggctgaagaaagacggcgaagtgcggggcagcatcaacagattcaagacca
gcgactacgtgaaagaagccaaacagctgctgaaggtgcagaaggcctaccaccagctggaccagagcttcatcgacacctacatcgacctgctggaaacccg
gcggacctactatgagggacctggcgagggcagccccttcggctggaaggacatcaaagaatggtacgagatgctgatgggccactgcacctacttccccgagg
aactgcggagcgtgaagtacgcctacaacgccgacctgtacaacgccctgaacgacctgaacaatctcgtgatcaccagggacgagaacgagaagctggaata
ttacgagaagttccagatcatcgagaacgtgttcaagcagaagaagaagcccaccctgaagcagatcgccaaagaaatcctcgtgaacgaagaggatattaagg
gctacagagtgaccagcaccggcaagcccgagttcaccaacctgaaggtgtaccacgacatcaaggacattaccgcccggaaagagattattgagaacgccga
gctgctggatcagattgccaagatcctgaccatctaccagagcagcgaggacatccaggaagaactgaccaatctgaactccgagctgacccaggaagagatcg
agcagatctctaatctgaagggctataccggcacccacaacctgagcctgaaggccatcaacctgatcctggacgagctgtggcacaccaacgacaaccagatc
gctatcttcaaccggctgaagctggtgcccaagaaggtggacctgtcccagcagaaagagatccccaccaccctggtggacgacttcatcctgagccccgtcgtga
agagaagcttcatccagagcatcaaagtgatcaacgccatcatcaagaagtacggcctgcccaacgacatcattatcgagctggcccgcgagaagaactccaag
gacgcccagaaaatgatcaacgagatgcagaagcggaaccggcagaccaacgagcggatcgaggaaatcatccggaccaccggcaaagagaacgccaag
tacctgatcgagaagatcaagctgcacgacatgcaggaaggcaagtgcctgtacagcctggaagccatccctctggaagatctgctgaacaaccccttcaactatg
aggtggaccacatcatccccagaagcgtgtccttcgacaacagcttcaacaacaaggtgctcgtgaagcaggaagaagccagcaagaagggcaaccggaccc
cattccagtacctgagcagcagcgacagcaagatcagctacgaaaccttcaagaagcacatcctgaatctggccaagggcaagggcagaatcagcaagacca
agaaagagtatctgctggaagaacgggacatcaacaggttctccgtgcagaaagacttcatcaaccggaacctggtggataccagatacgccaccagaggcctg
atgaacctgctgcggagctacttcagagtgaacaacctggacgtgaaagtgaagtccatcaatggcggcttcaccagctttctgcggcggaagtggaagtttaagaa
agagcggaacaaggggtacaagcaccacgccgaggacgccctgatcattgccaacgccgatttcatcttcaaagagtggaagaaactggacaaggccaaaaa
agtgatggaaaaccagatgttcgaggaaaagcaggccgagagcatgcccgagatcgaaaccgagcaggagtacaaagagatcttcatcaccccccaccagat
caagcacattaaggacttcaaggactacaagtacagccaccgggggacaagaagcctaatagagagctgattaacgacaccctgtactccacccggaaggac
gacaagggcaacaccctgatcgtgaacaatctgaacggcctgtacgacaaggacaatgacaagctgaaaaagctgatcaacaagagccccgaaaagctgctg
atgtaccaccacgacccccagacctaccagaaactgaagctgattatggaacagtacggcgacgagaagaatcccctgtacaagtactacgaggaaaccggga
actacctgaccaagtactccaaaaaggacaacggccccgtgatcaagaagattaagtattacggcaacaaactgaacgcccatctggacatcaccgacgactac
cccaacagcagaaacaaggtcgtgaagctgtccctgaagccctacagattcgacgtgtacctggacaatggcgtgtacaagttcgtgaccgtgaagaatctggatgt
gatcaaaaaagaaaactactacgaagtgaatagcaagtgctatgaggaagctaagaagctgaagaagatcagcaaccaggccgagtttatcgcctccttctacaa
caacgatctgatcaagatcaacggcgagctgtatagagtgatcggcgtgaacaacgacctgctgaaccggatcgaagtgaacatgatcgacatcacctaccgcga
gtacctggaaaacatgaacgacaagaggccccccaggatcattaagacaatcgcctccaagacccagagcattaagaagtacagcacagacattctgggcaac
ctgtatgaagtgaaatctaagaagcaccctcagatcatcaaaaagggcaaaaggccggggccacgaaaaaggccggccaggcaaaaaagaaaaagggat
ccgaggccagcggttccggacgggctgacgcattggacgattttgatctggatatgctgggaagtgacgccctcgatgattttgaccttgacatgcttggttcggatgcc
cttgatgactttgacctcgacatgctcggcagtgacgcccttgatgatttcgacctggacatgctgattaactcaagatgatctagacatatggatatctgactagtctcga
gtttattgcagcttataatggttacaaataaagcaatagcatcacaaatttcacaaataaagcatttttttcactggaccgagcggccgcaggaacccctagtgatggag
ttggccactccctctctgcgcgctcgctcgctcactgaggccgggcgaccaaaggtcgcccgacgcccgggctttgcccgggggcctcagtgagcgagcgagcg
cgcagctgcctgcaggggcgcctgatgcggtattttctccttacgcatctgtgcggtatttcacaccgcatacgtcaaagcaaccatagtacgcgccctgtagcggcgc
attaagcgcggcgggtgtggtggttacgcgcagcgtgaccgctacacttgccagcgccctagcgcccgctcctttcgctttcttcccttcctttctcgccacgttcgccggc
tttccccgtcaagctctaaatcgggggctccctttagggttccgatttagtgctttacggcacctcgaccccaaaaaacttgatttgggtgatggttcacgtagtgggccat
cgccctgatagacggtttttcgccctttgacgttggagtccacgttctttaatagtggactcttgttccaaactggaacaacactcaaccctatctcgggctattcttttgattta
taagggattttgccgatttcggcctattggttaaaaaatgagctgatttaacaaaaatttaacgcgaattttaacaaaatattaacgtttacaattttatggtgcactctcagta
caatctgctctgatgccgcatagttaagccagccccgacacccgccaacacccgctgacgcgccctgacgggcttgtctgctcccggcatccgcttacagacaagct
gtgaccgtctccgggagctgcatgtgtcagaggttttcaccgtcatcaccgaaacgcgcgagacgaaagggcctcgtgatacgcctatttttataggttaatgtcatgat
aataatggtttcttagacgtcaggtggcacttttcggggaaatgtgcgcggaacccctatttgtttatttttctaaatacattcaaatatgtatccgctcatgagacaataacc
ctgataaatgcttcaataatattgaaaaaggaagagtatgagtattcaacatttccgtgtcgcccttattcccttttttgcggcattttgccttcctgtttttgctcacccagaaac
gctggtgaaagtaaaagatgctgaagatcagttgggtgcacgagtgggttacatcgaactggatctcaacagcggtaagatccttgagagttttcgccccgaagaac
gttttccaatgatgagcacttttaaagttctgctatgtggcgcggtattatcccgtattgacgccgggcaagagcaactcggtcgccgcatacactattctcagaatgactt
ggttgagtactcaccagtcacagaaaagcatcttacggatggcatgacagtaagagaattatgcagtgctgccataaccatgagtgataacactgcggccaacttac
ttctgacaacgatcggaggaccgaaggagctaaccgcttttttgcacaacatgggggatcatgtaactcgccttgatcgttgggaaccggagctgaatgaagccata
ccaaacgacgagcgtgacaccacgatgcctgtagcaatggcaacaacgttgcgcaaactattaactggcgaactacttactctagcttcccggcaacaattaatag
actggatggaggcggataaagttgcaggaccacttctgcgctcggcccttccggctggctggtttattgctgataaatctggagccggtgagcgtgggtctcgcggtatc
attgcagcactggggccagatggtaagccctcccgtatcgtagttatctacacgacggggagtcaggcaactatggatgaacgaaatagacagatcgctgagatag
gtgcctcactgattaagcattggtaactgtcagaccaagtttactcatatatactttagattgatttaaaacttcattittaatttaaaaggatctaggtgaagatcctttttgata
atctcatgaccaaaatcccttaacgtgagttttcgttccactgagcgtcagaccccgtagaaaagatcaaaggatcttcttgagatcctttttttctgcgcgtaatctgctgct
tgcaaacaaaaaaaccaccgctaccagcggtggtttgtttgccggatcaagagctaccaactctttttccgaaggtaactggcttcagcagagcgcagataccaaat
actgtccttctagtgtagccgtagttaggccaccacttcaagaactctgtagcaccgcctacatacctcgctctgctaatcctgttaccagtggctgctgccagtggcgat
aagtcgtgtcttaccgggttggactcaagacgatagttaccggataaggcgcagcggtcgggctgaacggggggttcgtgcacacagcccagcttggagcgaacg
acctacaccgaactgagatacctacagcgtgagctatgagaaagcgccacgcttcccgaagggagaaaggcggacaggtatccggtaagcggcagggtcgga
acaggagagcgcacgagggagcttccagggggaaacgcctggtatctttatagtcctgtcgggtttcgccacctctgacttgagcgtcgatttttgtgatgctcgtcagg
ggggcggagcctatggaaaaacgccagcaacgcggcctttttacggttcctggccttttgctggccttttgctcacatgt
3. Sequences for in vitro screening using patch clamp in DRG neurons- PAIN
pAAV-U6gRNA(LacZ-sa_sgRNA)-CMV-sadCas9-VP64 used as control in in vitro experiments (SEQ ID NO:
130)
cctgcaggcagctgcgcgctcgctcgctcactgaggccgcccgggcaaagcccgggcgtcgggcgacctttggtcgcccggcctcagtgagcgagcgagcgcg
cagagagggagtggccaactccatcactaggggttcctgcggccgcacgcgtggtaccgagggcctatttcccatgattccttcatatttgcatatacgatacaaggct
gttagagagataattggaattaatttgactgtaaacacaaagatattagtacaaaatacgtgacgtagaaagtaataatttcttgggtagtttgcagttttaaaattatgtttt
aaaatggactatcatatgcttaccgtaacttgaaagtatttcgatttcttggctttatatatcttgtggaaaggacgaaacaccGTGCGAATACGCCCACGCG
ATgttttagtactctggaaacagaatctactaaaacaaggcaaaatgccgtgtttatctcgtcaacttgttggcgagatttttgcgacgcgtggagttccgcgttacataa
cttacggtaaatggcccgcctggctgaccgcccaacgacccccgcccattgacgtcaataatgacgtatgttcccatagtaacgccaatagggactttccattgacgtc
aatgggtggagtatttacggtaaactgcccacttggcagtacatcaagtgtatcatatgccaagtacgccccctattgacgtcaatgacggtaaatggcccgcctggca
ttatgcccagtacatgaccttatgggactttcctacttggcagtacatctacgtattagtcatcgctattaccatggtgatgcggttttggcagtacatcaatgggcgtggata
gcggtttgactcacggggatttccaagtctccaccccattgacgtcaatgggagtttgttttggcaccaaaatcaacgggactttccaaaatgtcgtaacaactccgccc
cattgacgcaaatgggcggtaggcgtgtacggtgggaggtctatataagcagagctcgtttagtgaaccgtcagatcgcctggagacgccatccacgctgttttgacc
tccatagaagacaccgGAATTCGGTACCACCGGTgccaccatggccccaaagaagaagcggaaggtcggtatccacggagtcccagcagccaag
cggaactacatcctgggcctggccatcggcatcaccagcgtgggctacggcatcatcgactacgagacacgggacgtgatcgatgccggcgtgcggctgttcaaa
gaggccaacgtggaaaacaacgagggcaggcggagcaagagaggcgccagaaggctgaagcggcggaggcggcatagaatccagagagtgaagaagct
gctgttcgactacaacctgctgaccgaccacagcgagctgagcggcatcaacccctacgaggccagagtgaagggcctgagccagaagctgagcgaggaaga
gttctctgccgccctgctgcacctggccaagagaagaggcgtgcacaacgtgaacgaggtggaagaggacaccggcaacgagctgtccaccaaagagcagat
cagccggaacagcaaggccctggaagagaaatacgtggccgaactgcagctggaacggctgaagaaagacggcgaagtgcggggcagcatcaacagattc
aagaccagcgactacgtgaaagaagccaaacagctgctgaaggtgcagaaggcctaccaccagctggaccagagcttcatcgacacctacatcgacctgctgg
aaacccggcggacctactatgagggacctggcgagggcagccccttcggctggaaggacatcaaagaatggtacgagatgctgatgggccactgcacctacttc
cccgaggaactgcggagcgtgaagtacgcctacaacgccgacctgtacaacgccctgaacgacctgaacaatctcgtgatcaccagggacgagaacgagaag
ctggaatattacgagaagttccagatcatcgagaacgtgttcaagcagaagaagaagcccaccctgaagcagatcgccaaagaaatcctcgtgaacgaagagg
atattaagggctacagagtgaccagcaccggcaagcccgagttcaccaacctgaaggtgtaccacgacatcaaggacattaccgcccggaaagagattattgag
aacgccgagctgctggatcagattgccaagatcctgaccattaccagagcagcgaggacatccaggaagaactgaccaatctgaactccgagctgacccagga
agagatcgagcagatctctaatctgaagggctataccggcacccacaacctgagcctgaaggccatcaacctgatcctggacgagctgtggcacaccaacgaca
accagatcgctatcttcaaccggctgaagctggtgcccaagaaggtggacctgtcccagcagaaagagatccccaccaccctggtggacgacttcatcctgagccc
cgtcgtgaagagaagcttcatccagagcatcaaagtgatcaacgccatcatcaagaagtacggcctgcccaacgacatcattatcgagctggcccgcgagaaga
actccaaggacgcccagaaaatgatcaacgagatgcagaagcggaaccggcagaccaacgagcggatcgaggaaatcatccggaccaccggcaaagaga
acgccaagtacctgatcgagaagatcaagctgcacgacatgcaggaaggcaagtgcctgtacagcctggaagccatccctctggaagatctgctgaacaacccct
tcaactatgaggtggaccacatcatccccagaagcgtgtccttcgacaacagcttcaacaacaaggtgctcgtgaagcaggaagaagccagcaagaagggcaa
ccggaccccattccagtacctgagcagcagcgacagcaagatcagctacgaaaccttcaagaagcacatcctgaatctggccaagggcaagggcagaatcagc
aagaccaagaaagagtatctgctggaagaacgggacatcaacaggttctccgtgcagaaagacttcatcaaccggaacctggtggataccagatacgccaccag
aggcctgatgaacctgctgcggagctacttcagagtgaacaacctggacgtgaaagtgaagtccatcaatggcggcttcaccagctttctgcggcggaagtggaag
tttaagaaagagcggaacaaggggtacaagcaccacgccgaggacgccctgatcattgccaacgccgatttcatcttcaaagagtggaagaaactggacaagg
ccaaaaaagtgatggaaaaccagatgttcgaggaaaagcaggccgagagcatgcccgagatcgaaaccgagcaggagtacaaagagatcttcatcacccccc
accagatcaagcacattaaggacttcaaggactacaagtacagccaccgggggacaagaagcctaatagagagctgattaacgacaccctgtactccacccgg
aaggacgacaagggcaacaccctgatcgtgaacaatctgaacggcctgtacgacaaggacaatgacaagctgaaaaagctgatcaacaagagccccgaaaa
gctgctgatgtaccaccacgacccccagacctaccagaaactgaagctgattatggaacagtacggcgacgagaagaatcccctgtacaagtactacgaggaaa
ccgggaactacctgaccaagtactccaaaaaggacaacggccccgtgatcaagaagattaagtattacggcaacaaactgaacgcccatctggacatcaccgac
gactaccccaacagcagaaacaaggtcgtgaagctgtccctgaagccctacagattcgacgtgtacctggacaatggcgtgtacaagttcgtgaccgtgaagaatc
tggatgtgatcaaaaaagaaaactactacgaagtgaatagcaagtgctatgaggaagctaagaagctgaagaagatcagcaaccaggccgagtttatcgcctcct
tctacaacaacgatctgatcaagatcaacggcgagctgtatagagtgatcggcgtgaacaacgacctgctgaaccggatcgaagtgaacatgatcgacatcaccta
ccgcgagtacctggaaaacatgaacgacaagaggccccccaggatcattaagacaatcgcctccaagacccagagcattaagaagtacagcacagacattctg
ggcaacctgtatgaagtgaaatctaagaagcaccctcagatcatcaaaaagggcaaaaggccggcggccacgaaaaaggccggccaggcaaaaaagaaaa
agggatccgaggccagcggttccggacgggctgacgcattggacgattttgatctggatatgctgggaagtgacgccctcgatgattttgaccttgacatgcttggttcg
gatgcccttgatgactttgacctcgacatgctcggcagtgacgcccttgatgatttcgacctggacatgctgattaactcaagatgatctagacatatggatatctgactag
tctcgagtttattgcagcttataatggttacaaataaagcaatagcatcacaaatttcacaaataaagcatttttttcactggaccgagcggccgcaggaacccctagtg
atggagttggccactccctctctgcgcgctcgctcgctcactgaggccgggcgaccaaaggtcgcccgacgcccgggctttgcccgggggcctcagtgagcgag
cgagcgcgcagctgcctgcaggggcgcctgatgcggtattttctccttacgcatctgtgcggtatttcacaccgcatacgtcaaagcaaccatagtacgcgccctgtag
cggcgcattaagcgcggcgggtgtggtggttacgcgcagcgtgaccgctacacttgccagcgccctagcgcccgctcctttcgctttcttcccttcctttctcgccacgttc
gccggctttccccgtcaagctctaaatcgggggctccctttagggttccgatttagtgctttacggcacctcgaccccaaaaaacttgatttgggtgatggttcacgtagtg
ggccatcgccctgatagacggtttttcgccctttgacgttggagtccacgttctttaatagtggactcttgttccaaactggaacaacactcaaccctatctcgggctattcttt
tgatttataagggattttgccgatttcggcctattggttaaaaaatgagctgatttaacaaaaatttaacgcgaattttaacaaaatattaacgtttacaattttatggtgcact
ctcagtacaatctgctctgatgccgcatagttaagccagccccgacacccgccaacacccgctgacgcgccctgacgggcttgtctgctcccggcatccgcttacag
acaagctgtgaccgtctccgggagctgcatgtgtcagaggttttcaccgtcatcaccgaaacgcgcgagacgaaagggcctcgtgatacgcctatttttataggttaat
gtcatgataataatggtttcttagacgtcaggtggcacttttcggggaaatgtgcgcggaacccctatttgtttatttttctaaatacattcaaatatgtatccgctcatgagac
aataaccctgataaatgcttcaataatattgaaaaaggaagagtatgagtattcaacatttccgtgtcgcccttattcccttttttgcggcattttgccttcctgtttttgctcacc
cagaaacgctggtgaaagtaaaagatgctgaagatcagttgggtgcacgagtgggttacatcgaactggatctcaacagcggtaagatccttgagagttttcgcccc
gaagaacgttttccaatgatgagcacttttaaagttctgctatgtggcgcggtattatcccgtattgacgccgggcaagagcaactcggtcgccgcatacactattctcag
aatgacttggttgagtactcaccagtcacagaaaagcatcttacggatggcatgacagtaagagaattatgcagtgctgccataaccatgagtgataacactgcggc
caacttacttctgacaacgatcggaggaccgaaggagctaaccgcttttttgcacaacatgggggatcatgtaactcgccttgatcgttgggaaccggagctgaatga
agccataccaaacgacgagcgtgacaccacgatgcctgtagcaatggcaacaacgttgcgcaaactattaactggcgaactacttactctagcttcccggcaacaa
ttaatagactggatggaggcggataaagttgcaggaccacttctgcgctcggcccttccggctggctggtttattgctgataaatctggagccggtgagcgtgggtctcg
cggtatcattgcagcactggggccagatggtaagccctcccgtatcgtagttatctacacgacggggagtcaggcaactatggatgaacgaaatagacagatcgct
gagataggtgcctcactgattaagcattggtaactgtcagaccaagtttactcatatatactttagattgatttaaaacttcatttttaatttaaaaggatctaggtgaagatcc
tttttgataatctcatgaccaaaatcccttaacgtgagttttcgttccactgagcgtcagaccccgtagaaaagatcaaaggatcttcttgagatcctttttttctgcgcgtaat
ctgctgcttgcaaacaaaaaaaccaccgctaccagcggtggtttgtttgccggatcaagagctaccaactctttttccgaaggtaactggcttcagcagagcgcagat
accaaatactgtccttctagtgtagccgtagttaggccaccacttcaagaactctgtagcaccgcctacatacctcgctctgctaatcctgttaccagtggctgctgccagt
ggcgataagtcgtgtcttaccgggttggactcaagacgatagttaccggataaggcgcagcggtcgggctgaacggggggttcgtgcacacagcccagcttggag
cgaacgacctacaccgaactgagatacctacagcgtgagctatgagaaagcgccacgcttcccgaagggagaaaggcggacaggtatccggtaagcggcagg
gtcggaacaggagagcgcacgagggagcttccagggggaaacgcctggtatctttatagtcctgtcgggtttcgccacctctgacttgagcgtcgatttttgtgatgctc
gtcaggggggggagcctatggaaaaacgccagcaacgcggcctttttacggttcctggccttttgctggccttttgctcacatgt
pAAV-U6gRNA(Kcna2-sa_sgRNA2)-CMV-sadCas9-VP64 used in in vitro experiments (SEQ ID NO: 131)
cctgcaggcagctgcgcgctcgctcgctcactgaggccgcccgggcaaagcccgggcgtcgggcgacctttggtcgcccggcctcagtgagcgagcgagcgcg
cagagagggagtggccaactccatcactaggggttcctgcggccgcacgcgtggtaccgagggcctatttcccatgattccttcatatttgcatatacgatacaaggct
gttagagagataattggaattaatttgactgtaaacacaaagatattagtacaaaatacgtgacgtagaaagtaataatttcttgggtagtttgcagttttaaaattatgtttt
aaaatggactatcatatgcttaccgtaacttgaaagtatttcgatttcttggctttatatatcttgtggaaaggacgaaacaccGCCCCAGCCGGCCCCTTTA
ATgttttagtactctggaaacagaatctactaaaacaaggcaaaatgccgtgtttatctcgtcaacttgttggcgagatttttgcgacgcgtggagttccgcgttacataa
cttacggtaaatggcccgcctggctgaccgcccaacgacccccgcccattgacgtcaataatgacgtatgttcccatagtaacgccaatagggactttccattgacgtc
aatgggtggagtatttacggtaaactgcccacttggcagtacatcaagtgtatcatatgccaagtacgccccctattgacgtcaatgacggtaaatggcccgcctggca
ttatgcccagtacatgaccttatgggactttcctacttggcagtacatctacgtattagtcatcgctattaccatggtgatgcggttttggcagtacatcaatgggcgtggata
gcggtttgactcacggggatttccaagtctccaccccattgacgtcaatgggagtttgttttggcaccaaaatcaacgggactttccaaaatgtcgtaacaactccgccc
cattgacgcaaatgggcggtaggcgtgtacggtgggaggtctatataagcagagctcgtttagtgaaccgtcagatcgcctggagacgccatccacgctgttttgacc
tccatagaagacaccgGAATTCGGTACCACCGGTgccaccatggccccaaagaagaagcggaaggtcggtatccacggagtcccagcagccaag
cggaactacatcctgggcctggccatcggcatcaccagcgtgggctacggcatcatcgactacgagacacgggacgtgatcgatgccggcgtgcggctgttcaaa
gaggccaacgtggaaaacaacgagggcaggcggagcaagagaggcgccagaaggctgaagcggcggaggcggcatagaatccagagagtgaagaagct
gctgttcgactacaacctgctgaccgaccacagcgagctgagcggcatcaacccctacgaggccagagtgaagggcctgagccagaagctgagcgaggaaga
gttctctgccgccctgctgcacctggccaagagaagaggcgtgcacaacgtgaacgaggtggaagaggacaccggcaacgagctgtccaccaaagagcagat
cagccggaacagcaaggccctggaagagaaatacgtggccgaactgcagctggaacggctgaagaaagacggcgaagtgcggggcagcatcaacagattc
aagaccagcgactacgtgaaagaagccaaacagctgctgaaggtgcagaaggcctaccaccagctggaccagagcttcatcgacacctacatcgacctgctgg
aaacccggcggacctactatgagggacctggcgagggcagccccttcggctggaaggacatcaaagaatggtacgagatgctgatgggccactgcacctacttc
cccgaggaactgcggagcgtgaagtacgcctacaacgccgacctgtacaacgccctgaacgacctgaacaatctcgtgatcaccagggacgagaacgagaag
ctggaatattacgagaagttccagatcatcgagaacgtgttcaagcagaagaagaagcccaccctgaagcagatcgccaaagaaatcctcgtgaacgaagagg
atattaagggctacagagtgaccagcaccggcaagcccgagttcaccaacctgaaggtgtaccacgacatcaaggacattaccgcccggaaagagattattgag
aacgccgagctgctggatcagattgccaagatcctgaccatctaccagagcagcgaggacatccaggaagaactgaccaatctgaactccgagctgacccagga
agagatcgagcagatctctaatctgaagggctataccggcacccacaacctgagcctgaaggccatcaacctgatcctggacgagctgtggcacaccaacgaca
accagatcgctatcttcaaccggctgaagctggtgcccaagaaggtggacctgtcccagcagaaagagatccccaccaccctggtggacgacttcatcctgagccc
cgtcgtgaagagaagcttcatccagagcatcaaagtgatcaacgccatcatcaagaagtacggcctgcccaacgacatcattatcgagctggcccgcgagaaga
actccaaggacgcccagaaaatgatcaacgagatgcagaagcggaaccggcagaccaacgagcggatcgaggaaatcatccggaccaccggcaaagaga
acgccaagtacctgatcgagaagatcaagctgcacgacatgcaggaaggcaagtgcctgtacagcctggaagccatccctctggaagatctgctgaacaacccct
tcaactatgaggtggaccacatcatccccagaagcgtgtccttcgacaacagcttcaacaacaaggtgctcgtgaagcaggaagaagccagcaagaagggcaa
ccggaccccattccagtacctgagcagcagcgacagcaagatcagctacgaaaccttcaagaagcacatcctgaatctggccaagggcaagggcagaatcagc
aagaccaagaaagagtatctgctggaagaacgggacatcaacaggttctccgtgcagaaagacttcatcaaccggaacctggtggataccagatacgccaccag
aggcctgatgaacctgctgcggagctacttcagagtgaacaacctggacgtgaaagtgaagtccatcaatggcggcttcaccagctttctgcggcggaagtggaag
tttaagaaagagcggaacaaggggtacaagcaccacgccgaggacgccctgatcattgccaacgccgatttcatcttcaaagagtggaagaaactggacaagg
ccaaaaaagtgatggaaaaccagatgttcgaggaaaagcaggccgagagcatgcccgagatcgaaaccgagcaggagtacaaagagatcttcatcacccccc
accagatcaagcacattaaggacttcaaggactacaagtacagccaccgggggacaagaagcctaatagagagctgattaacgacaccctgtactccacccgg
aaggacgacaagggcaacaccctgatcgtgaacaatctgaacggcctgtacgacaaggacaatgacaagctgaaaaagctgatcaacaagagccccgaaaa
gctgctgatgtaccaccacgacccccagacctaccagaaactgaagctgattatggaacagtacggcgacgagaagaatcccctgtacaagtactacgaggaaa
ccgggaactacctgaccaagtactccaaaaaggacaacggccccgtgatcaagaagattaagtattacggcaacaaactgaacgcccatctggacatcaccgac
gactaccccaacagcagaaacaaggtcgtgaagctgtccctgaagccctacagattcgacgtgtacctggacaatggcgtgtacaagttcgtgaccgtgaagaatc
tggatgtgatcaaaaaagaaaactactacgaagtgaatagcaagtgctatgaggaagctaagaagctgaagaagatcagcaaccaggccgagtttatcgcctcct
tctacaacaacgatctgatcaagatcaacggcgagctgtatagagtgatcggcgtgaacaacgacctgctgaaccggatcgaagtgaacatgatcgacatcaccta
ccgcgagtacctggaaaacatgaacgacaagaggccccccaggatcattaagacaatcgcctccaagacccagagcattaagaagtacagcacagacattctg
ggcaacctgtatgaagtgaaatctaagaagcaccctcagatcatcaaaaagggcaaaaggccggcggccacgaaaaaggccggccaggcaaaaaagaaaa
agggatccgaggccagcggttccggacgggctgacgcattggacgattttgatctggatatgctgggaagtgacgccctcgatgattttgaccttgacatgcttggttcg
gatgcccttgatgactttgacctcgacatgctcggcagtgacgcccttgatgatttcgacctggacatgctgattaactcaagatgatctagacatatggatatctgactag
tctcgagtttattgcagcttataatggttacaaataaagcaatagcatcacaaatttcacaaataaagcatttttttcactggaccgagcggccgcaggaacccctagtg
atggagttggccactccctctctgcgcgctcgctcgctcactgaggccgggcgaccaaaggtcgcccgacgcccgggctttgcccgggcggcctcagtgagcgag
cgagcgcgcagctgcctgcaggggcgcctgatgcggtattttctccttacgcatctgtgcggtatttcacaccgcatacgtcaaagcaaccatagtacgcgccctgtag
cggcgcattaagcgcggcgggtgtggtggttacgcgcagcgtgaccgctacacttgccagcgccctagcgcccgctcctttcgctttcttcccttcctttctcgccacgttc
gccggctttccccgtcaagctctaaatcgggggctccctttagggttccgatttagtgctttacggcacctcgaccccaaaaaacttgatttgggtgatggttcacgtagtg
ggccatcgccctgatagacggtttttcgccctttgacgttggagtccacgttctttaatagtggactcttgttccaaactggaacaacactcaaccctatctcgggctattcttt
tgatttataagggattttgccgatttcggcctattggttaaaaaatgagctgatttaacaaaaatttaacgcgaattttaacaaaatattaacgtttacaattttatggtgcact
ctcagtacaatctgctctgatgccgcatagttaagccagccccgacacccgccaacacccgctgacgcgccctgacgggcttgtctgctcccggcatccgcttacag
acaagctgtgaccgtctccgggagctgcatgtgtcagaggttttcaccgtcatcaccgaaacgcgcgagacgaaagggcctcgtgatacgcctatttttataggttaat
gtcatgataataatggtttcttagacgtcaggtggcacttttcggggaaatgtgcgcggaacccctatttgtttatttttctaaatacattcaaatatgtatccgctcatgagac
aataaccctgataaatgcttcaataatattgaaaaaggaagagtatgagtattcaacatttccgtgtcgcccttattcccttttttgcggcattttgccttcctgtttttgctcacc
cagaaacgctggtgaaagtaaaagatgctgaagatcagttgggtgcacgagtgggttacatcgaactggatctcaacagcggtaagatccttgagagttttcgcccc
gaagaacgttttccaatgatgagcacttttaaagttctgctatgtggcgcggtattatcccgtattgacgccgggcaagagcaactcggtcgccgcatacactattctcag
aatgacttggttgagtactcaccagtcacagaaaagcatcttacggatggcatgacagtaagagaattatgcagtgctgccataaccatgagtgataacactgcggc
caacttacttctgacaacgatcggaggaccgaaggagctaaccgcttttttgcacaacatgggggatcatgtaactcgccttgatcgttgggaaccggagctgaatga
agccataccaaacgacgagcgtgacaccacgatgcctgtagcaatggcaacaacgttgcgcaaactattaactggcgaactacttactctagcttcccggcaacaa
ttaatagactggatggaggcggataaagttgcaggaccacttctgcgctcggcccttccggctggctggtttattgctgataaatctggagccggtgagcgtgggtctcg
cggtatcattgcagcactggggccagatggtaagccctcccgtatcgtagttatctacacgacggggagtcaggcaactatggatgaacgaaatagacagatcgct
gagataggtgcctcactgattaagcattggtaactgtcagaccaagtttactcatatatactttagattgatttaaaacttcatttttaatttaaaaggatctaggtgaagatcc
tttttgataatctcatgaccaaaatcccttaacgtgagttttcgttccactgagcgtcagaccccgtagaaaagatcaaaggatcttcttgagatcctttttttctgcgcgtaat
ctgctgcttgcaaacaaaaaaaccaccgctaccagcggtggtttgtttgccggatcaagagctaccaactctttttccgaaggtaactggcttcagcagagcgcagat
accaaatactgtccttctagtgtagccgtagttaggccaccacttcaagaactctgtagcaccgcctacatacctcgctctgctaatcctgttaccagtggctgctgccagt
ggcgataagtcgtgtcttaccgggttggactcaagacgatagttaccggataaggcgcagcggtcgggctgaacggggggttcgtgcacacagcccagcttggag
cgaacgacctacaccgaactgagatacctacagcgtgagctatgagaaagcgccacgcttcccgaagggagaaaggcggacaggtatccggtaagcggcagg
gtcggaacaggagagcgcacgagggagcttccagggggaaacgcctggtatctttatagtcctgtcgggtttcgccacctctgacttgagcgtcgatttttgtgatgctc
gtcaggggggggagcctatggaaaaacgccagcaacgcggcctttttacggttcctggccttttgctggccttttgctcacatgt
pAAV-U6gRNA(Kcnj2-sa_sgRNA1)-CMV-sadCas9-VP64 used in in vitro experiments (SEQ ID NO: 132)
cctgcaggcagctgcgcgctcgctcgctcactgaggccgcccgggcaaagcccgggcgtcgggcgacctttggtcgcccggcctcagtgagcgagcgagcgcg
cagagagggagtggccaactccatcactaggggttcctgcggccgcacgcgtggtaccgagggcctatttcccatgattccttcatatttgcatatacgatacaaggct
gttagagagataattggaattaatttgactgtaaacacaaagatattagtacaaaatacgtgacgtagaaagtaataatttcttgggtagtttgcagttttaaaattatgtttt
aaaatggactatcatatgcttaccgtaacttgaaagtatttcgatttcttggctttatatatcttgtggaaaggacgaaacaccTCCTCCTCCTGATGGCGGT
TCGttttagtactctggaaacagaatctactaaaacaaggcaaaatgccgtgtttatctcgtcaacttgttggcgagatttttgcgacgcgtggagttccgcgttacataa
cttacggtaaatggcccgcctggctgaccgcccaacgacccccgcccattgacgtcaataatgacgtatgttcccatagtaacgccaatagggactttccattgacgtc
aatgggtggagtatttacggtaaactgcccacttggcagtacatcaagtgtatcatatgccaagtacgccccctattgacgtcaatgacggtaaatggcccgcctggca
ttatgcccagtacatgaccttatgggactttcctacttggcagtacatctacgtattagtcatcgctattaccatggtgatgcggttttggcagtacatcaatgggcgtggata
gcggtttgactcacggggatttccaagtctccaccccattgacgtcaatgggagtttgttttggcaccaaaatcaacgggactttccaaaatgtcgtaacaactccgccc
cattgacgcaaatgggcggtaggcgtgtacggtgggaggtctatataagcagagctcgtttagtgaaccgtcagatcgcctggagacgccatccacgctgttttgacc
tccatagaagacaccgGAATTCGGTACCACCGGTgccaccatggccccaaagaagaagcggaaggtcggtatccacggagtcccagcagccaag
cggaactacatcctgggcctggccatcggcatcaccagcgtgggctacggcatcatcgactacgagacacgggacgtgatcgatgccggcgtgcggctgttcaaa
gaggccaacgtggaaaacaacgagggcaggcggagcaagagaggcgccagaaggctgaagcggcggaggcggcatagaatccagagagtgaagaagct
gctgttcgactacaacctgctgaccgaccacagcgagctgagcggcatcaacccctacgaggccagagtgaagggcctgagccagaagctgagcgaggaaga
gttctctgccgccctgctgcacctggccaagagaagaggcgtgcacaacgtgaacgaggtggaagaggacaccggcaacgagctgtccaccaaagagcagat
cagccggaacagcaaggccctggaagagaaatacgtggccgaactgcagctggaacggctgaagaaagacggcgaagtgcggggcagcatcaacagattc
aagaccagcgactacgtgaaagaagccaaacagctgctgaaggtgcagaaggcctaccaccagctggaccagagcttcatcgacacctacatcgacctgctgg
aaacccggcggacctactatgagggacctggcgagggcagccccttcggctggaaggacatcaaagaatggtacgagatgctgatgggccactgcacctacttc
cccgaggaactgcggagcgtgaagtacgcctacaacgccgacctgtacaacgccctgaacgacctgaacaatctcgtgatcaccagggacgagaacgagaag
ctggaatattacgagaagttccagatcatcgagaacgtgttcaagcagaagaagaagcccaccctgaagcagatcgccaaagaaatcctcgtgaacgaagagg
atattaagggctacagagtgaccagcaccggcaagcccgagttcaccaacctgaaggtgtaccacgacatcaaggacattaccgcccggaaagagattattgag
aacgccgagctgctggatcagattgccaagatcctgaccatctaccagagcagcgaggacatccaggaagaactgaccaatctgaactccgagctgacccagga
agagatcgagcagatctctaatctgaagggctataccggcacccacaacctgagcctgaaggccatcaacctgatcctggacgagctgtggcacaccaacgaca
accagatcgctatcttcaaccggctgaagctggtgcccaagaaggtggacctgtcccagcagaaagagatccccaccaccctggtggacgacttcatcctgagccc
cgtcgtgaagagaagcttcatccagagcatcaaagtgatcaacgccatcatcaagaagtacggcctgcccaacgacatcattatcgagctggcccgcgagaaga
actccaaggacgcccagaaaatgatcaacgagatgcagaagcggaaccggcagaccaacgagcggatcgaggaaatcatccggaccaccggcaaagaga
acgccaagtacctgatcgagaagatcaagctgcacgacatgcaggaaggcaagtgcctgtacagcctggaagccatccctctggaagatctgctgaacaacccct
tcaactatgaggtggaccacatcatccccagaagcgtgtccttcgacaacagcttcaacaacaaggtgctcgtgaagcaggaagaagccagcaagaagggcaa
ccggaccccattccagtacctgagcagcagcgacagcaagatcagctacgaaaccttcaagaagcacatcctgaatctggccaagggcaagggcagaatcagc
aagaccaagaaagagtatctgctggaagaacgggacatcaacaggttctccgtgcagaaagacttcatcaaccggaacctggtggataccagatacgccaccag
aggcctgatgaacctgctgcggagctacttcagagtgaacaacctggacgtgaaagtgaagtccatcaatggcggcttcaccagctttctgcggcggaagtggaag
tttaagaaagagcggaacaaggggtacaagcaccacgccgaggacgccctgatcattgccaacgccgatttcatcttcaaagagtggaagaaactggacaagg
ccaaaaaagtgatggaaaaccagatgttcgaggaaaagcaggccgagagcatgcccgagatcgaaaccgagcaggagtacaaagagatcttcatcacccccc
accagatcaagcacattaaggacttcaaggactacaagtacagccaccgggggacaagaagcctaatagagagctgattaacgacaccctgtactccacccgg
aaggacgacaagggcaacaccctgatcgtgaacaatctgaacggcctgtacgacaaggacaatgacaagctgaaaaagctgatcaacaagagccccgaaaa
gctgctgatgtaccaccacgacccccagacctaccagaaactgaagctgattatggaacagtacggcgacgagaagaatcccctgtacaagtactacgaggaaa
ccgggaactacctgaccaagtactccaaaaaggacaacggccccgtgatcaagaagattaagtattacggcaacaaactgaacgcccatctggacatcaccgac
gactaccccaacagcagaaacaaggtcgtgaagctgtccctgaagccctacagattcgacgtgtacctggacaatggcgtgtacaagttcgtgaccgtgaagaatc
tggatgtgatcaaaaaagaaaactactacgaagtgaatagcaagtgctatgaggaagctaagaagctgaagaagatcagcaaccaggccgagtttatcgcctcct
tctacaacaacgatctgatcaagatcaacggcgagctgtatagagtgatcggcgtgaacaacgacctgctgaaccggatcgaagtgaacatgatcgacatcaccta
ccgcgagtacctggaaaacatgaacgacaagaggccccccaggatcattaagacaatcgcctccaagacccagagcattaagaagtacagcacagacattctg
ggcaacctgtatgaagtgaaatctaagaagcaccctcagatcatcaaaaagggcaaaaggccggcggccacgaaaaaggccggccaggcaaaaaagaaaa
agggatccgaggccagcggttccggacgggctgacgcattggacgattttgatctggatatgctgggaagtgacgccctcgatgattttgaccttgacatgcttggttcg
gatgcccttgatgactttgacctcgacatgctcggcagtgacgcccttgatgatttcgacctggacatgctgattaactcaagatgatctagacatatggatatctgactag
tctcgagtttattgcagcttataatggttacaaataaagcaatagcatcacaaatttcacaaataaagcatttttttcactggaccgagcggccgcaggaacccctagtg
atggagttggccactccctctctgcgcgctcgctcgctcactgaggccgggcgaccaaaggtcgcccgacgcccgggctttgcccgggcggcctcagtgagcgag
cgagcgcgcagctgcctgcaggggcgcctgatgcggtattttctccttacgcatctgtgcggtatttcacaccgcatacgtcaaagcaaccatagtacgcgccctgtag
cggcgcattaagcgcggcgggtgtggtggttacgcgcagcgtgaccgctacacttgccagcgccctagcgcccgctcctttcgctttcttcccttcctttctcgccacgttc
gccggctttccccgtcaagctctaaatcgggggctccctttagggttccgatttagtgctttacggcacctcgaccccaaaaaacttgatttgggtgatggttcacgtagtg
ggccatcgccctgatagacggtttttcgccctttgacgttggagtccacgttctttaatagtggactcttgttccaaactggaacaacactcaaccctatctcgggctattcttt
tgatttataagggattttgccgatttcggcctattggttaaaaaatgagctgatttaacaaaaatttaacgcgaattttaacaaaatattaacgtttacaattttatggtgcact
ctcagtacaatctgctctgatgccgcatagttaagccagccccgacacccgccaacacccgctgacgcgccctgacgggcttgtctgctcccggcatccgcttacag
acaagctgtgaccgtctccgggagctgcatgtgtcagaggttttcaccgtcatcaccgaaacgcgcgagacgaaagggcctcgtgatacgcctatttttataggttaat
gtcatgataataatggtttcttagacgtcaggtggcacttttcggggaaatgtgcgcggaacccctatttgtttatttttctaaatacattcaaatatgtatccgctcatgagac
aataaccctgataaatgcttcaataatattgaaaaaggaagagtatgagtattcaacatttccgtgtcgcccttattcccttttttgcggcattttgccttcctgtttttgctcacc
cagaaacgctggtgaaagtaaaagatgctgaagatcagttgggtgcacgagtgggttacatcgaactggatctcaacagcggtaagatccttgagagttttcgcccc
gaagaacgttttccaatgatgagcacttttaaagttctgctatgtggcgcggtattatcccgtattgacgccgggcaagagcaactcggtcgccgcatacactattctcag
aatgacttggttgagtactcaccagtcacagaaaagcatcttacggatggcatgacagtaagagaattatgcagtgctgccataaccatgagtgataacactgcggc
caacttacttctgacaacgatcggaggaccgaaggagctaaccgcttttttgcacaacatgggggatcatgtaactcgccttgatcgttgggaaccggagctgaatga
agccataccaaacgacgagcgtgacaccacgatgcctgtagcaatggcaacaacgttgcgcaaactattaactggcgaactacttactctagcttcccggcaacaa
ttaatagactggatggaggcggataaagttgcaggaccacttctgcgctcggcccttccggctggctggtttattgctgataaatctggagccggtgagcgtgggtctcg
cggtatcattgcagcactggggccagatggtaagccctcccgtatcgtagttatctacacgacggggagtcaggcaactatggatgaacgaaatagacagatcgct
gagataggtgcctcactgattaagcattggtaactgtcagaccaagtttactcatatatactttagattgatttaaaacttcatttttaatttaaaaggatctaggtgaagatcc
tttttgataatctcatgaccaaaatcccttaacgtgagttttcgttccactgagcgtcagaccccgtagaaaagatcaaaggatcttcttgagatcctttttttctgcgcgtaat
ctgctgcttgcaaacaaaaaaaccaccgctaccagcggtggtttgtttgccggatcaagagctaccaactctttttccgaaggtaactggcttcagcagagcgcagat
accaaatactgtccttctagtgtagccgtagttaggccaccacttcaagaactctgtagcaccgcctacatacctcgctctgctaatcctgttaccagtggctgctgccagt
ggcgataagtcgtgtcttaccgggttggactcaagacgatagttaccggataaggcgcagcggtcgggctgaacggggggttcgtgcacacagcccagcttggag
cgaacgacctacaccgaactgagatacctacagcgtgagctatgagaaagcgccacgcttcccgaagggagaaaggcggacaggtatccggtaagcggcagg
gtcggaacaggagagcgcacgagggagcttccagggggaaacgcctggtatctttatagtcctgtcgggtttcgccacctctgacttgagcgtcgatttttgtgatgctc
gtcaggggggcggagcctatggaaaaacgccagcaacgcggcctttttacggttcctggccttttgctggccttttgctcacatgt
pAAV-U6gRNA(Kcnj2-sa_sgRNA2)-CMV-sadCas9-VP64 used in in vitro experiments (SEQ ID NO: 133)
cctgcaggcagctgcgcgctcgctcgctcactgaggccgcccgggcaaagcccgggcgtcgggcgacctttggtcgcccggcctcagtgagcgagcgagcgcg
cagagagggagtggccaactccatcactaggggttcctgcggccgcacgcgtggtaccgagggcctatttcccatgattccttcatatttgcatatacgatacaaggct
gttagagagataattggaattaatttgactgtaaacacaaagatattagtacaaaatacgtgacgtagaaagtaataatttcttgggtagtttgcagttttaaaattatgtttt
aaaatggactatcatatgcttaccgtaacttgaaagtatttcgatttcttggctttatatatcttgtggaaaggacgaaacaccGCCCCGGGAACCGCCATCA
GGGttttagtactctggaaacagaatctactaaaacaaggcaaaatgccgtgtttatctcgtcaacttgttggcgagatttttgcgacgcgtggagttccgcgttacata
acttacggtaaatggcccgcctggctgaccgcccaacgacccccgcccattgacgtcaataatgacgtatgttcccatagtaacgccaatagggactttccattgacg
tcaatgggtggagtatttacggtaaactgcccacttggcagtacatcaagtgtatcatatgccaagtacgccccctattgacgtcaatgacggtaaatggcccgcctgg
cattatgcccagtacatgaccttatgggactttcctacttggcagtacatctacgtattagtcatcgctattaccatggtgatgcggttttggcagtacatcaatgggcgtgg
atagcggtttgactcacggggatttccaagtctccaccccattgacgtcaatgggagtttgttttggcaccaaaatcaacgggactttccaaaatgtcgtaacaactccg
ccccattgacgcaaatgggcggtaggcgtgtacggtgggaggtctatataagcagagctcgtttagtgaaccgtcagatcgcctggagacgccatccacgctgttttg
acctccatagaagacaccgGAATTCGGTACCACCGGTgccaccatggccccaaagaagaagcggaaggtcggtatccacggagtcccagcagcc
aagcggaactacatcctgggcctggccatcggcatcaccagcgtgggctacggcatcatcgactacgagacacgggacgtgatcgatgccggcgtgcggctgttc
aaagaggccaacgtggaaaacaacgagggcaggcggagcaagagaggcgccagaaggctgaagcggcggaggcggcatagaatccagagagtgaaga
agctgctgttcgactacaacctgctgaccgaccacagcgagctgagcggcatcaacccctacgaggccagagtgaagggcctgagccagaagctgagcgagga
agagttctctgccgccctgctgcacctggccaagagaagaggcgtgcacaacgtgaacgaggtggaagaggacaccggcaacgagctgtccaccaaagagca
gatcagccggaacagcaaggccctggaagagaaatacgtggccgaactgcagctggaacggctgaagaaagacggcgaagtgcggggcagcatcaacaga
ttcaagaccagcgactacgtgaaagaagccaaacagctgctgaaggtgcagaaggcctaccaccagctggaccagagcttcatcgacacctacatcgacctgct
ggaaacccggcggacctactatgagggacctggcgagggcagccccttcggctggaaggacatcaaagaatggtacgagatgctgatgggccactgcacctact
tccccgaggaactgcggagcgtgaagtacgcctacaacgccgacctgtacaacgccctgaacgacctgaacaatctcgtgatcaccagggacgagaacgagaa
gctggaatattacgagaagttccagatcatcgagaacgtgttcaagcagaagaagaagcccaccctgaagcagatcgccaaagaaatcctcgtgaacgaagag
gatattaagggctacagagtgaccagcaccggcaagcccgagttcaccaacctgaaggtgtaccacgacatcaaggacattaccgcccggaaagagattattga
gaacgccgagctgctggatcagattgccaagatcctgaccatctaccagagcagcgaggacatccaggaagaactgaccaatctgaactccgagctgacccagg
aagagatcgagcagatctctaatctgaagggctataccggcacccacaacctgagcctgaaggccatcaacctgatcctggacgagctgtggcacaccaacgac
aaccagatcgctatcttcaaccggctgaagctggtgcccaagaaggtggacctgtcccagcagaaagagatccccaccaccctggtggacgacttcatcctgagc
cccgtcgtgaagagaagcttcatccagagcatcaaagtgatcaacgccatcatcaagaagtacggcctgcccaacgacatcattatcgagctggcccgcgagaag
aactccaaggacgcccagaaaatgatcaacgagatgcagaagcggaaccggcagaccaacgagcggatcgaggaaatcatccggaccaccggcaaagag
aacgccaagtacctgatcgagaagatcaagctgcacgacatgcaggaaggcaagtgcctgtacagcctggaagccatccctctggaagatctgctgaacaaccc
cttcaactatgaggtggaccacatcatccccagaagcgtgtccttcgacaacagcttcaacaacaaggtgctcgtgaagcaggaagaagccagcaagaagggca
accggaccccattccagtacctgagcagcagcgacagcaagatcagctacgaaaccttcaagaagcacatcctgaatctggccaagggcaagggcagaatcag
caagaccaagaaagagtatctgctggaagaacgggacatcaacaggttctccgtgcagaaagacttcatcaaccggaacctggtggataccagatacgccacca
gaggcctgatgaacctgctgcggagctacttcagagtgaacaacctggacgtgaaagtgaagtccatcaatggcggcttcaccagctttctgcggcggaagtggaa
gtttaagaaagagcggaacaaggggtacaagcaccacgccgaggacgccctgatcattgccaacgccgatttcatcttcaaagagtggaagaaactggacaag
gccaaaaaagtgatggaaaaccagatgttcgaggaaaagcaggccgagagcatgcccgagatcgaaaccgagcaggagtacaaagagatcttcatcacccc
ccaccagatcaagcacattaaggacttcaaggactacaagtacagccaccgggggacaagaagcctaatagagagctgattaacgacaccctgtactccaccc
ggaaggacgacaagggcaacaccctgatcgtgaacaatctgaacggcctgtacgacaaggacaatgacaagctgaaaaagctgatcaacaagagccccgaa
aagctgctgatgtaccaccacgacccccagacctaccagaaactgaagctgattatggaacagtacggcgacgagaagaatcccctgtacaagtactacgagga
aaccgggaactacctgaccaagtactccaaaaaggacaacggccccgtgatcaagaagattaagtattacggcaacaaactgaacgcccatctggacatcacc
gacgactaccccaacagcagaaacaaggtcgtgaagctgtccctgaagccctacagattcgacgtgtacctggacaatggcgtgtacaagttcgtgaccgtgaag
aatctggatgtgatcaaaaaagaaaactactacgaagtgaatagcaagtgctatgaggaagctaagaagctgaagaagatcagcaaccaggccgagtttatcgc
ctccttctacaacaacgatctgatcaagatcaacggcgagctgtatagagtgatcggcgtgaacaacgacctgctgaaccggatcgaagtgaacatgatcgacatc
acctaccgcgagtacctggaaaacatgaacgacaagaggccccccaggatcattaagacaatcgcctccaagacccagagcattaagaagtacagcacagac
attctgggcaacctgtatgaagtgaaatctaagaagcaccctcagatcatcaaaaagggcaaaaggccggcggccacgaaaaaggccggccaggcaaaaaa
gaaaaagggatccgaggccagcggttccggacgggctgacgcattggacgattttgatctggatatgctgggaagtgacgccctcgatgattttgaccttgacatgctt
ggttcggatgcccttgatgactttgacctcgacatgctcggcagtgacgcccttgatgatttcgacctggacatgctgattaactcaagatgatctagacatatggatatct
gactagtctcgagtttattgcagcttataatggttacaaataaagcaatagcatcacaaatttcacaaataaagcatttttttcactggaccgagcggccgcaggaaccc
ctagtgatggagttggccactccctctctgcgcgctcgctcgctcactgaggccgggcgaccaaaggtcgcccgacgcccgggctttgcccgggcggcctcagtga
gcgagcgagcgcgcagctgcctgcaggggcgcctgatgcggtattttctccttacgcatctgtgcggtatttcacaccgcatacgtcaaagcaaccatagtacgcgcc
ctgtagcggcgcattaagcgcggcgggtgtggtggttacgcgcagcgtgaccgctacacttgccagcgccctagcgcccgctcctttcgctttcttcccttcctttctcgcc
acgttcgccggctttccccgtcaagctctaaatcgggggctccctttagggttccgatttagtgctttacggcacctcgaccccaaaaaacttgatttgggtgatggttcac
gtagtgggccatcgccctgatagacggtttttcgccctttgacgttggagtccacgttctttaatagtggactcttgttccaaactggaacaacactcaaccctatctcgggc
tattcttttgatttataagggattttgccgatttcggcctattggttaaaaaatgagctgatttaacaaaaatttaacgcgaattttaacaaaatattaacgtttacaattttatggt
gcactctcagtacaatctgctctgatgccgcatagttaagccagccccgacacccgccaacacccgctgacgcgccctgacgggcttgtctgctcccggcatccgctt
acagacaagctgtgaccgtctccgggagctgcatgtgtcagaggttttcaccgtcatcaccgaaacgcgcgagacgaaagggcctcgtgatacgcctatttttatagg
ttaatgtcatgataataatggtttcttagacgtcaggtggcacttttcggggaaatgtgcgcggaacccctatttgtttatttttctaaatacattcaaatatgtatccgctcatg
agacaataaccctgataaatgcttcaataatattgaaaaaggaagagtatgagtattcaacatttccgtgtcgcccttattcccttttttgcggcattttgccttcctgtttttgct
cacccagaaacgctggtgaaagtaaaagatgctgaagatcagttgggtgcacgagtgggttacatcgaactggatctcaacagcggtaagatccttgagagttttcg
ccccgaagaacgttttccaatgatgagcacttttaaagttctgctatgtggcgcggtattatcccgtattgacgccgggcaagagcaactcggtcgccgcatacactatt
ctcagaatgacttggttgagtactcaccagtcacagaaaagcatcttacggatggcatgacagtaagagaattatgcagtgctgccataaccatgagtgataacactg
cggccaacttacttctgacaacgatcggaggaccgaaggagctaaccgcttttttgcacaacatgggggatcatgtaactcgccttgatcgttgggaaccggagctga
atgaagccataccaaacgacgagcgtgacaccacgatgcctgtagcaatggcaacaacgttgcgcaaactattaactggcgaactacttactctagcttcccggca
acaattaatagactggatggaggcggataaagttgcaggaccacttctgcgctcggcccttccggctggctggtttattgctgataaatctggagccggtgagcgtggg
tctcgcggtatcattgcagcactggggccagatggtaagccctcccgtatcgtagttatctacacgacggggagtcaggcaactatggatgaacgaaatagacagat
cgctgagataggtgcctcactgattaagcattggtaactgtcagaccaagtttactcatatatactttagattgatttaaaacttcatttttaatttaaaaggatctaggtgaag
atcctttttgataatctcatgaccaaaatcccttaacgtgagttttcgttccactgagcgtcagaccccgtagaaaagatcaaaggatcttcttgagatcctttttttctgcgcg
taatctgctgcttgcaaacaaaaaaaccaccgctaccagcggtggtttgtttgccggatcaagagctaccaactctttttccgaaggtaactggcttcagcagagcgca
gataccaaatactgtccttctagtgtagccgtagttaggccaccacttcaagaactctgtagcaccgcctacatacctcgctctgctaatcctgttaccagtggctgctgcc
agtggcgataagtcgtgtcttaccgggttggactcaagacgatagttaccggataaggcgcagcggtcgggctgaacggggggttcgtgcacacagcccagcttgg
agcgaacgacctacaccgaactgagatacctacagcgtgagctatgagaaagcgccacgcttcccgaagggagaaaggcggacaggtatccggtaagcggca
gggtcggaacaggagagcgcacgagggagcttccagggggaaacgcctggtatctttatagtcctgtcgggtttcgccacctctgacttgagcgtcgatttttgtgatg
ctcgtcaggggggcggagcctatggaaaaacgccagcaacgcggcctttttacggttcctggccttttgctggccttttgctcacatgt
pAAV-U6gRNA(Kcnq2-sa_sgRNA6)-CMV-sadCas9-VP64 used in in vitro experiments (SEQ ID NO: 134)
cctgcaggcagctgcgcgctcgctcgctcactgaggccgcccgggcaaagcccgggcgtcgggcgacctttggtcgcccggcctcagtgagcgagcgagcgcg
cagagagggagtggccaactccatcactaggggttcctgcggccgcacgcgtggtaccgagggcctatttcccatgattccttcatatttgcatatacgatacaaggct
gttagagagataattggaattaatttgactgtaaacacaaagatattagtacaaaatacgtgacgtagaaagtaataatttcttgggtagtttgcagttttaaaattatgtttt
aaaatggactatcatatgcttaccgtaacttgaaagtatttcgatttcttggctttatatatcttgtggaaaggacgaaacaccTCCTAGCCCGGTAATCCTT
GAgttttagtactctggaaacagaatctactaaaacaaggcaaaatgccgtgtttatctcgtcaacttgttggcgagatttttgcgacgcgtggagttccgcgttacataa
cttacggtaaatggcccgcctggctgaccgcccaacgacccccgcccattgacgtcaataatgacgtatgttcccatagtaacgccaatagggactttccattgacgtc
aatgggtggagtatttacggtaaactgcccacttggcagtacatcaagtgtatcatatgccaagtacgccccctattgacgtcaatgacggtaaatggcccgcctggca
ttatgcccagtacatgaccttatgggactttcctacttggcagtacatctacgtattagtcatcgctattaccatggtgatgcggttttggcagtacatcaatgggcgtggata
gcggtttgactcacggggatttccaagtctccaccccattgacgtcaatgggagtttgttttggcaccaaaatcaacgggactttccaaaatgtcgtaacaactccgccc
cattgacgcaaatgggcggtaggcgtgtacggtgggaggtctatataagcagagctcgtttagtgaaccgtcagatcgcctggagacgccatccacgctgttttgacc
tccatagaagacaccgGAATTCGGTACCACCGGTgccaccatggccccaaagaagaagcggaaggtcggtatccacggagtcccagcagccaag
cggaactacatcctgggcctggccatcggcatcaccagcgtgggctacggcatcatcgactacgagacacgggacgtgatcgatgccggcgtgcggctgttcaaa
gaggccaacgtggaaaacaacgagggcaggcggagcaagagaggcgccagaaggctgaagcggcggaggcggcatagaatccagagagtgaagaagct
gctgttcgactacaacctgctgaccgaccacagcgagctgagcggcatcaacccctacgaggccagagtgaagggcctgagccagaagctgagcgaggaaga
gttctctgccgccctgctgcacctggccaagagaagaggcgtgcacaacgtgaacgaggtggaagaggacaccggcaacgagctgtccaccaaagagcagat
cagccggaacagcaaggccctggaagagaaatacgtggccgaactgcagctggaacggctgaagaaagacggcgaagtgcggggcagcatcaacagattc
aagaccagcgactacgtgaaagaagccaaacagctgctgaaggtgcagaaggcctaccaccagctggaccagagcttcatcgacacctacatcgacctgctgg
aaacccggcggacctactatgagggacctggcgagggcagccccttcggctggaaggacatcaaagaatggtacgagatgctgatgggccactgcacctacttc
cccgaggaactgcggagcgtgaagtacgcctacaacgccgacctgtacaacgccctgaacgacctgaacaatctcgtgatcaccagggacgagaacgagaag
ctggaatattacgagaagttccagatcatcgagaacgtgttcaagcagaagaagaagcccaccctgaagcagatcgccaaagaaatcctcgtgaacgaagagg
atattaagggctacagagtgaccagcaccggcaagcccgagttcaccaacctgaaggtgtaccacgacatcaaggacattaccgcccggaaagagattattgag
aacgccgagctgctggatcagattgccaagatcctgaccatctaccagagcagcgaggacatccaggaagaactgaccaatctgaactccgagctgacccagga
agagatcgagcagatctctaatctgaagggctataccggcacccacaacctgagcctgaaggccatcaacctgatcctggacgagctgtggcacaccaacgaca
accagatcgctatcttcaaccggctgaagctggtgcccaagaaggtggacctgtcccagcagaaagagatccccaccaccctggtggacgacttcatcctgagccc
cgtcgtgaagagaagcttcatccagagcatcaaagtgatcaacgccatcatcaagaagtacggcctgcccaacgacatcattatcgagctggcccgcgagaaga
actccaaggacgcccagaaaatgatcaacgagatgcagaagcggaaccggcagaccaacgagcggatcgaggaaatcatccggaccaccggcaaagaga
acgccaagtacctgatcgagaagatcaagctgcacgacatgcaggaaggcaagtgcctgtacagcctggaagccatccctctggaagatctgctgaacaacccct
tcaactatgaggtggaccacatcatccccagaagcgtgtccttcgacaacagcttcaacaacaaggtgctcgtgaagcaggaagaagccagcaagaagggcaa
ccggaccccattccagtacctgagcagcagcgacagcaagatcagctacgaaaccttcaagaagcacatcctgaatctggccaagggcaagggcagaatcagc
aagaccaagaaagagtatctgctggaagaacgggacatcaacaggttctccgtgcagaaagacttcatcaaccggaacctggtggataccagatacgccaccag
aggcctgatgaacctgctgcggagctacttcagagtgaacaacctggacgtgaaagtgaagtccatcaatggcggcttcaccagctttctgcggcggaagtggaag
tttaagaaagagcggaacaaggggtacaagcaccacgccgaggacgccctgatcattgccaacgccgatttcatcttcaaagagtggaagaaactggacaagg
ccaaaaaagtgatggaaaaccagatgttcgaggaaaagcaggccgagagcatgcccgagatcgaaaccgagcaggagtacaaagagatcttcatcacccccc
accagatcaagcacattaaggacttcaaggactacaagtacagccaccgggggacaagaagcctaatagagagctgattaacgacaccctgtactccacccgg
aaggacgacaagggcaacaccctgatcgtgaacaatctgaacggcctgtacgacaaggacaatgacaagctgaaaaagctgatcaacaagagccccgaaaa
gctgctgatgtaccaccacgacccccagacctaccagaaactgaagctgattatggaacagtacggcgacgagaagaatcccctgtacaagtactacgaggaaa
ccgggaactacctgaccaagtactccaaaaaggacaacggccccgtgatcaagaagattaagtattacggcaacaaactgaacgcccatctggacatcaccgac
gactaccccaacagcagaaacaaggtcgtgaagctgtccctgaagccctacagattcgacgtgtacctggacaatggcgtgtacaagttcgtgaccgtgaagaatc
tggatgtgatcaaaaaagaaaactactacgaagtgaatagcaagtgctatgaggaagctaagaagctgaagaagatcagcaaccaggccgagtttatcgcctcct
tctacaacaacgatctgatcaagatcaacggcgagctgtatagagtgatcggcgtgaacaacgacctgctgaaccggatcgaagtgaacatgatcgacatcaccta
ccgcgagtacctggaaaacatgaacgacaagaggccccccaggatcattaagacaatcgcctccaagacccagagcattaagaagtacagcacagacattctg
ggcaacctgtatgaagtgaaatctaagaagcaccctcagatcatcaaaaagggcaaaaggccggcggccacgaaaaaggccggccaggcaaaaaagaaaa
agggatccgaggccagcggttccggacgggctgacgcattggacgattttgatctggatatgctgggaagtgacgccctcgatgattttgaccttgacatgcttggttcg
gatgcccttgatgactttgacctcgacatgctcggcagtgacgcccttgatgatttcgacctggacatgctgattaactcaagatgatctagacatatggatatctgactag
tctcgagtttattgcagcttataatggttacaaataaagcaatagcatcacaaatttcacaaataaagcatttttttcactggaccgagcggccgcaggaacccctagtg
atggagttggccactccctctctgcgcgctcgctcgctcactgaggccgggcgaccaaaggtcgcccgacgcccgggctttgcccgggcggcctcagtgagcgag
cgagcgcgcagctgcctgcaggggcgcctgatgcggtattttctccttacgcatctgtgcggtatttcacaccgcatacgtcaaagcaaccatagtacgcgccctgtag
cggcgcattaagcgcggcgggtgtggtggttacgcgcagcgtgaccgctacacttgccagcgccctagcgcccgctcctttcgctttcttcccttcctttctcgccacgttc
gccggctttccccgtcaagctctaaatcgggggctccctttagggttccgatttagtgctttacggcacctcgaccccaaaaaacttgatttgggtgatggttcacgtagtg
ggccatcgccctgatagacggtttttcgccctttgacgttggagtccacgttctttaatagtggactcttgttccaaactggaacaacactcaaccctatctcgggctattcttt
tgatttataagggattttgccgatttcggcctattggttaaaaaatgagctgatttaacaaaaatttaacgcgaattttaacaaaatattaacgtttacaattttatggtgcact
ctcagtacaatctgctctgatgccgcatagttaagccagccccgacacccgccaacacccgctgacgcgccctgacgggcttgtctgctcccggcatccgcttacag
acaagctgtgaccgtctccgggagctgcatgtgtcagaggttttcaccgtcatcaccgaaacgcgcgagacgaaagggcctcgtgatacgcctatttttataggttaat
gtcatgataataatggtttcttagacgtcaggtggcacttttcggggaaatgtgcgcggaacccctatttgtttatttttctaaatacattcaaatatgtatccgctcatgagac
aataaccctgataaatgcttcaataatattgaaaaaggaagagtatgagtattcaacatttccgtgtcgcccttattcccttttttgcggcattttgccttcctgtttttgctcacc
cagaaacgctggtgaaagtaaaagatgctgaagatcagttgggtgcacgagtgggttacatcgaactggatctcaacagcggtaagatccttgagagttttcgcccc
gaagaacgttttccaatgatgagcacttttaaagttctgctatgtggcgcggtattatcccgtattgacgccgggcaagagcaactcggtcgccgcatacactattctcag
aatgacttggttgagtactcaccagtcacagaaaagcatcttacggatggcatgacagtaagagaattatgcagtgctgccataaccatgagtgataacactgcggc
caacttacttctgacaacgatcggaggaccgaaggagctaaccgcttttttgcacaacatgggggatcatgtaactcgccttgatcgttgggaaccggagctgaatga
agccataccaaacgacgagcgtgacaccacgatgcctgtagcaatggcaacaacgttgcgcaaactattaactggcgaactacttactctagcttcccggcaacaa
ttaatagactggatggaggcggataaagttgcaggaccacttctgcgctcggcccttccggctggctggtttattgctgataaatctggagccggtgagcgtgggtctcg
cggtatcattgcagcactggggccagatggtaagccctcccgtatcgtagttatctacacgacggggagtcaggcaactatggatgaacgaaatagacagatcgct
gagataggtgcctcactgattaagcattggtaactgtcagaccaagtttactcatatatactttagattgatttaaaacttcatttttaatttaaaaggatctaggtgaagatcc
tttttgataatctcatgaccaaaatcccttaacgtgagttttcgttccactgagcgtcagaccccgtagaaaagatcaaaggatcttcttgagatcctttttttctgcgcgtaat
ctgctgcttgcaaacaaaaaaaccaccgctaccagcggtggtttgtttgccggatcaagagctaccaactctttttccgaaggtaactggcttcagcagagcgcagat
accaaatactgtccttctagtgtagccgtagttaggccaccacttcaagaactctgtagcaccgcctacatacctcgctctgctaatcctgttaccagtggctgctgccagt
ggcgataagtcgtgtcttaccgggttggactcaagacgatagttaccggataaggcgcagcggtcgggctgaacggggggttcgtgcacacagcccagcttggag
cgaacgacctacaccgaactgagatacctacagcgtgagctatgagaaagcgccacgcttcccgaagggagaaaggcggacaggtatccggtaagcggcagg
gtcggaacaggagagcgcacgagggagcttccagggggaaacgcctggtatctttatagtcctgtcgggtttcgccacctctgacttgagcgtcgatttttgtgatgctc
gtcaggggggcggagcctatggaaaaacgccagcaacgcggcctttttacggttcctggccttttgctggccttttgctcacatgt
pAAV-U6gRNA(Kcnq3-sa_sgRNA3)-CMV-sadCas9-VP64 used in in vitro experiments (SEQ ID NO: 135)
cctgcaggcagctgcgcgctcgctcgctcactgaggccgcccgggcaaagcccgggcgtcgggcgacctttggtcgcccggcctcagtgagcgagcgagcgcg
cagagagggagtggccaactccatcactaggggttcctgcggccgcacgcgtggtaccgagggcctatttcccatgattccttcatatttgcatatacgatacaaggct
gttagagagataattggaattaatttgactgtaaacacaaagatattagtacaaaatacgtgacgtagaaagtaataatttcttgggtagtttgcagttttaaaattatgtttt
aaaatggactatcatatgcttaccgtaacttgaaagtatttcgatttcttggctttatatatcttgtggaaaggacgaaacaccgCTACTGCCGCTGCAGCGG
GGCgttttagtactctggaaacagaatctactaaaacaaggcaaaatgccgtgtttatctcgtcaacttgttggcgagatttttgcgacgcgtggagttccgcgttacat
aacttacggtaaatggcccgcctggctgaccgcccaacgacccccgcccattgacgtcaataatgacgtatgttcccatagtaacgccaatagggactttccattgac
gtcaatgggtggagtatttacggtaaactgcccacttggcagtacatcaagtgtatcatatgccaagtacgccccctattgacgtcaatgacggtaaatggcccgcctg
gcattatgcccagtacatgaccttatgggactttcctacttggcagtacatctacgtattagtcatcgctattaccatggtgatgcggttttggcagtacatcaatgggcgtg
gatagcggtttgactcacggggatttccaagtctccaccccattgacgtcaatgggagtttgttttggcaccaaaatcaacgggactttccaaaatgtcgtaacaactcc
gccccattgacgcaaatgggcggtaggcgtgtacggtgggaggtctatataagcagagctcgtttagtgaaccgtcagatcgcctggagacgccatccacgctgtttt
gacctccatagaagacaccgGAATTCGGTACCACCGGTgccaccatggccccaaagaagaagcggaaggtcggtatccacggagtcccagcagc
caagcggaactacatcctgggcctggccatcggcatcaccagcgtgggctacggcatcatcgactacgagacacgggacgtgatcgatgccggcgtgcggctgtt
caaagaggccaacgtggaaaacaacgagggcaggcggagcaagagaggcgccagaaggctgaagcggcggaggcggcatagaatccagagagtgaag
aagctgctgttcgactacaacctgctgaccgaccacagcgagctgagcggcatcaacccctacgaggccagagtgaagggcctgagccagaagctgagcgagg
aagagttctctgccgccctgctgcacctggccaagagaagaggcgtgcacaacgtgaacgaggtggaagaggacaccggcaacgagctgtccaccaaagagc
agatcagccggaacagcaaggccctggaagagaaatacgtggccgaactgcagctggaacggctgaagaaagacggcgaagtgcggggcagcatcaacag
attcaagaccagcgactacgtgaaagaagccaaacagctgctgaaggtgcagaaggcctaccaccagctggaccagagcttcatcgacacctacatcgacctgc
tggaaacccggcggacctactatgagggacctggcgagggcagccccttcggctggaaggacatcaaagaatggtacgagatgctgatgggccactgcacctac
ttccccgaggaactgcggagcgtgaagtacgcctacaacgccgacctgtacaacgccctgaacgacctgaacaatctcgtgatcaccagggacgagaacgaga
agctggaatattacgagaagttccagatcatcgagaacgtgttcaagcagaagaagaagcccaccctgaagcagatcgccaaagaaatcctcgtgaacgaaga
ggatattaagggctacagagtgaccagcaccggcaagcccgagttcaccaacctgaaggtgtaccacgacatcaaggacattaccgcccggaaagagattattg
agaacgccgagctgctggatcagattgccaagatcctgaccatctaccagagcagcgaggacatccaggaagaactgaccaatctgaactccgagctgacccag
gaagagatcgagcagatctctaatctgaagggctataccggcacccacaacctgagcctgaaggccatcaacctgatcctggacgagctgtggcacaccaacga
caaccagatcgctatcttcaaccggctgaagctggtgcccaagaaggtggacctgtcccagcagaaagagatccccaccaccctggtggacgacttcatcctgag
ccccgtcgtgaagagaagcttcatccagagcatcaaagtgatcaacgccatcatcaagaagtacggcctgcccaacgacatcattatcgagctggcccgcgagaa
gaactccaaggacgcccagaaaatgatcaacgagatgcagaagcggaaccggcagaccaacgagcggatcgaggaaatcatccggaccaccggcaaaga
gaacgccaagtacctgatcgagaagatcaagctgcacgacatgcaggaaggcaagtgcctgtacagcctggaagccatccctctggaagatctgctgaacaacc
ccttcaactatgaggtggaccacatcatccccagaagcgtgtccttcgacaacagcttcaacaacaaggtgctcgtgaagcaggaagaagccagcaagaagggc
aaccggaccccattccagtacctgagcagcagcgacagcaagatcagctacgaaaccttcaagaagcacatcctgaatctggccaagggcaagggcagaatca
gcaagaccaagaaagagtatctgctggaagaacgggacatcaacaggttctccgtgcagaaagacttcatcaaccggaacctggtggataccagatacgccacc
agaggcctgatgaacctgctgcggagctacttcagagtgaacaacctggacgtgaaagtgaagtccatcaatggcggcttcaccagctttctgcggcggaagtgga
agtttaagaaagagcggaacaaggggtacaagcaccacgccgaggacgccctgatcattgccaacgccgatttcatcttcaaagagtggaagaaactggacaa
ggccaaaaaagtgatggaaaaccagatgttcgaggaaaagcaggccgagagcatgcccgagatcgaaaccgagcaggagtacaaagagatcttcatcaccc
cccaccagatcaagcacattaaggacttcaaggactacaagtacagccaccgggggacaagaagcctaatagagagctgattaacgacaccctgtactccacc
cggaaggacgacaagggcaacaccctgatcgtgaacaatctgaacggcctgtacgacaaggacaatgacaagctgaaaaagctgatcaacaagagccccga
aaagctgctgatgtaccaccacgacccccagacctaccagaaactgaagctgattatggaacagtacggcgacgagaagaatcccctgtacaagtactacgagg
aaaccgggaactacctgaccaagtactccaaaaaggacaacggccccgtgatcaagaagattaagtattacggcaacaaactgaacgcccatctggacatcac
cgacgactaccccaacagcagaaacaaggtcgtgaagctgtccctgaagccctacagattcgacgtgtacctggacaatggcgtgtacaagttcgtgaccgtgaa
gaatctggatgtgatcaaaaaagaaaactactacgaagtgaatagcaagtgctatgaggaagctaagaagctgaagaagatcagcaaccaggccgagtttatcg
cctccttctacaacaacgatctgatcaagatcaacggcgagctgtatagagtgatcggcgtgaacaacgacctgctgaaccggatcgaagtgaacatgatcgacat
cacctaccgcgagtacctggaaaacatgaacgacaagaggccccccaggatcattaagacaatcgcctccaagacccagagcattaagaagtacagcacaga
cattctgggcaacctgtatgaagtgaaatctaagaagcaccctcagatcatcaaaaagggcaaaaggccggcggccacgaaaaaggccggccaggcaaaaa
agaaaaagggatccgaggccagcggttccggacgggctgacgcattggacgattttgatctggatatgctgggaagtgacgccctcgatgattttgaccttgacatgc
ttggttcggatgcccttgatgactttgacctcgacatgctcggcagtgacgcccttgatgatttcgacctggacatgctgattaactcaagatgatctagacatatggatatc
tgactagtctcgagtttattgcagcttataatggttacaaataaagcaatagcatcacaaatttcacaaataaagcatttttttcactggaccgagcggccgcaggaacc
cctagtgatggagttggccactccctctctgcgcgctcgctcgctcactgaggccgggcgaccaaaggtcgcccgacgcccgggctttgcccgggcggcctcagtg
agcgagcgagcgcgcagctgcctgcaggggcgcctgatgcggtattttctccttacgcatctgtgcggtatttcacaccgcatacgtcaaagcaaccatagtacgcgc
cctgtagcggcgcattaagcgcggcgggtgtggtggttacgcgcagcgtgaccgctacacttgccagcgccctagcgcccgctcctttcgctttcttcccttcctttctcgc
cacgttcgccggctttccccgtcaagctctaaatcgggggctccctttagggttccgatttagtgctttacggcacctcgaccccaaaaaacttgatttgggtgatggttca
cgtagtgggccatcgccctgatagacggtttttcgccctttgacgttggagtccacgttctttaatagtggactcttgttccaaactggaacaacactcaaccctatctcggg
ctattcttttgatttataagggattttgccgatttcggcctattggttaaaaaatgagctgatttaacaaaaatttaacgcgaattttaacaaaatattaacgtttacaattttatg
gtgcactctcagtacaatctgctctgatgccgcatagttaagccagccccgacacccgccaacacccgctgacgcgccctgacgggcttgtctgctcccggcatccg
cttacagacaagctgtgaccgtctccgggagctgcatgtgtcagaggttttcaccgtcatcaccgaaacgcgcgagacgaaagggcctcgtgatacgcctatttttata
ggttaatgtcatgataataatggtttcttagacgtcaggtggcacttttcggggaaatgtgcgcggaacccctatttgtttatttttctaaatacattcaaatatgtatccgctca
tgagacaataaccctgataaatgcttcaataatattgaaaaaggaagagtatgagtattcaacatttccgtgtcgcccttattcccttttttgcggcattttgccttcctgtttttg
ctcacccagaaacgctggtgaaagtaaaagatgctgaagatcagttgggtgcacgagtgggttacatcgaactggatctcaacagcggtaagatccttgagagttttc
gccccgaagaacgttttccaatgatgagcacttttaaagttctgctatgtggcgcggtattatcccgtattgacgccgggcaagagcaactcggtcgccgcatacactat
tctcagaatgacttggttgagtactcaccagtcacagaaaagcatcttacggatggcatgacagtaagagaattatgcagtgctgccataaccatgagtgataacact
gcggccaacttacttctgacaacgatcggaggaccgaaggagctaaccgcttttttgcacaacatgggggatcatgtaactcgccttgatcgttgggaaccggagctg
aatgaagccataccaaacgacgagcgtgacaccacgatgcctgtagcaatggcaacaacgttgcgcaaactattaactggcgaactacttactctagcttcccggc
aacaattaatagactggatggaggcggataaagttgcaggaccacttctgcgctcggcccttccggctggctggtttattgctgataaatctggagccggtgagcgtgg
gtctcgcggtatcattgcagcactggggccagatggtaagccctcccgtatcgtagttatctacacgacggggagtcaggcaactatggatgaacgaaatagacag
atcgctgagataggtgcctcactgattaagcattggtaactgtcagaccaagtttactcatatatactttagattgatttaaaacttcattittaatttaaaaggatctaggtga
agatcctttttgataatctcatgaccaaaatcccttaacgtgagttttcgttccactgagcgtcagaccccgtagaaaagatcaaaggatcttcttgagatcctttttttctgcg
cgtaatctgctgcttgcaaacaaaaaaaccaccgctaccagcggtggtttgtttgccggatcaagagctaccaactctttttccgaaggtaactggcttcagcagagcg
cagataccaaatactgtccttctagtgtagccgtagttaggccaccacttcaagaactctgtagcaccgcctacatacctcgctctgctaatcctgttaccagtggctgct
gccagtggcgataagtcgtgtcttaccgggttggactcaagacgatagttaccggataaggcgcagcggtcgggctgaacggggggttcgtgcacacagcccagct
tggagcgaacgacctacaccgaactgagatacctacagcgtgagctatgagaaagcgccacgcttcccgaagggagaaaggcggacaggtatccggtaagcg
gcagggtcggaacaggagagcgcacgagggagcttccagggggaaacgcctggtatctttatagtcctgtcgggtttcgccacctctgacttgagcgtcgatttttgtg
atgctcgtcaggggggcggagcctatggaaaaacgccagcaacgcggcctttttacggttcctggccttttgctggccttttgctcacatgt
pAAV-U6gRNA(Kcna2-sa_sgRNA2)-U6gRNA(Kcnj2-sa_sgRNA1)-CMV-sadCas9-VP64 used in in vitro
experiments (SEQ ID NO: 136)
cctgcaggcagctgcgcgctcgctcgctcactgaggccgcccgggcaaagcccgggcgtcgggcgacctttggtcgcccggcctcagtgagcgagcgagcgcg
cagagagggagtggccaactccatcactaggggttcctgcggccgcacgcgtgagggcctatttcccatgattccttcatatttgcatatacgatacaaggctgttaga
gagataattggaattaatttgactgtaaacacaaagatattagtacaaaatacgtgacgtagaaagtaataatttcttgggtagtttgcagttttaaaattatgttttaaaatg
gactatcatatgcttaccgtaacttgaaagtatttcgatttcttggctttatatatcttgtggaaaggacgaaacaccGCCCCAGCCGGCCCCTTTAATGtttt
agtactctggaaacagaatctactaaaacaaggcaaaatgccgtgtttatctcgtcaacttgttggcgagatttttGGGCCCAAAAAATCTCGCCAACAA
GTTGACGAGATAAACACGGCATTTTGCCTTGTTTTAGTAGATTCTGTTTCCAGAGTACTAAAACGAACCGCCATCA
GGAGGAGGAGGTGTTTCGTCCTTTCCACAAGATATATAAAGCCAAGAAATCGAAATACTTTCAAGTTACGGTAAG
CATATGATAGTCCATTTTAAAACATAATTTTAAAACTGCAAACTACCCAAGAAATTATTACTTTCTACGTCACGTAT
TTTGTACTAATATCTTTGTGTTTACAGTCAAATTAATTCCAATTATCTCTCTAACAGCCTTGTATCGTATATGCAAAT
ATGAAGGAATCATGGGAAATAGGCCCTCCTCCAcgcgtggagttccgcgttacataacttacggtaaatggcccgcctggctgaccgcccaac
gacccccgcccattgacgtcaataatgacgtatgttcccatagtaacgccaatagggactttccattgacgtcaatgggtggagtatttacggtaaactgcccacttggc
agtacatcaagtgtatcatatgccaagtacgccccctattgacgtcaatgacggtaaatggcccgcctggcattatgcccagtacatgaccttatgggactttcctacttg
gcagtacatctacgtattagtcatcgctattaccatggtgatgcggttttggcagtacatcaatgggcgtggatagcggtttgactcacggggatttccaagtctccacccc
attgacgtcaatgggagtttgttttggcaccaaaatcaacgggactttccaaaatgtcgtaacaactccgccccattgacgcaaatgggcggtaggcgtgtacggtgg
gaggtctatataagcagagctcgtttagtgaaccgtcagatcgcctggagacgccatccacgctgttttgacctccatagaagacaccgGAATTCGGTACCA
CCGGTgccaccatggccccaaagaagaagcggaaggtcggtatccacggagtcccagcagccaagcggaactacatcctgggcctggccatcggcatcac
cagcgtgggctacggcatcatcgactacgagacacgggacgtgatcgatgccggcgtgcggctgttcaaagaggccaacgtggaaaacaacgagggcaggcg
gagcaagagaggcgccagaaggctgaagcggcggaggcggcatagaatccagagagtgaagaagctgctgttcgactacaacctgctgaccgaccacagcg
agctgagcggcatcaacccctacgaggccagagtgaagggcctgagccagaagctgagcgaggaagagttctctgccgccctgctgcacctggccaagagaa
gaggcgtgcacaacgtgaacgaggtggaagaggacaccggcaacgagctgtccaccaaagagcagatcagccggaacagcaaggccctggaagagaaat
acgtggccgaactgcagctggaacggctgaagaaagacggcgaagtgcggggcagcatcaacagattcaagaccagcgactacgtgaaagaagccaaaca
gctgctgaaggtgcagaaggcctaccaccagctggaccagagcttcatcgacacctacatcgacctgctggaaacccggcggacctactatgagggacctggcg
agggcagccccttcggctggaaggacatcaaagaatggtacgagatgctgatgggccactgcacctacttccccgaggaactgcggagcgtgaagtacgcctac
aacgccgacctgtacaacgccctgaacgacctgaacaatctcgtgatcaccagggacgagaacgagaagctggaatattacgagaagttccagatcatcgagaa
cgtgttcaagcagaagaagaagcccaccctgaagcagatcgccaaagaaatcctcgtgaacgaagaggatattaagggctacagagtgaccagcaccggcaa
gcccgagttcaccaacctgaaggtgtaccacgacatcaaggacattaccgcccggaaagagattattgagaacgccgagctgctggatcagattgccaagatcct
gaccatctaccagagcagcgaggacatccaggaagaactgaccaatctgaactccgagctgacccaggaagagatcgagcagatctctaatctgaagggctata
ccggcacccacaacctgagcctgaaggccatcaacctgatcctggacgagctgtggcacaccaacgacaaccagatcgctatcttcaaccggctgaagctggtgc
ccaagaaggtggacctgtcccagcagaaagagatccccaccaccctggtggacgacttcatcctgagccccgtcgtgaagagaagcttcatccagagcatcaaa
gtgatcaacgccatcatcaagaagtacggcctgcccaacgacatcattatcgagctggcccgcgagaagaactccaaggacgcccagaaaatgatcaacgaga
tgcagaagcggaaccggcagaccaacgagcggatcgaggaaatcatccggaccaccggcaaagagaacgccaagtacctgatcgagaagatcaagctgca
cgacatgcaggaaggcaagtgcctgtacagcctggaagccatccctctggaagatctgctgaacaaccccttcaactatgaggtggaccacatcatccccagaag
cgtgtccttcgacaacagcttcaacaacaaggtgctcgtgaagcaggaagaagccagcaagaagggcaaccggaccccattccagtacctgagcagcagcgac
agcaagatcagctacgaaaccttcaagaagcacatcctgaatctggccaagggcaagggcagaatcagcaagaccaagaaagagtatctgctggaagaacgg
gacatcaacaggttctccgtgcagaaagacttcatcaaccggaacctggtggataccagatacgccaccagaggcctgatgaacctgctgcggagctacttcaga
gtgaacaacctggacgtgaaagtgaagtccatcaatggcggcttcaccagctttctgcggcggaagtggaagtttaagaaagagcggaacaaggggtacaagca
ccacgccgaggacgccctgatcattgccaacgccgatttcatcttcaaagagtggaagaaactggacaaggccaaaaaagtgatggaaaaccagatgttcgagg
aaaagcaggccgagagcatgcccgagatcgaaaccgagcaggagtacaaagagatcttcatcaccccccaccagatcaagcacattaaggacttcaaggact
acaagtacagccaccgggtggacaagaagcctaatagagagctgattaacgacaccctgtactccacccggaaggacgacaagggcaacaccctgatcgtga
acaatctgaacggcctgtacgacaaggacaatgacaagctgaaaaagctgatcaacaagagccccgaaaagctgctgatgtaccaccacgacccccagaccta
ccagaaactgaagctgattatggaacagtacggcgacgagaagaatcccctgtacaagtactacgaggaaaccgggaactacctgaccaagtactccaaaaag
gacaacggccccgtgatcaagaagattaagtattacggcaacaaactgaacgcccatctggacatcaccgacgactaccccaacagcagaaacaaggtcgtga
agctgtccctgaagccctacagattcgacgtgtacctggacaatggcgtgtacaagttcgtgaccgtgaagaatctggatgtgatcaaaaaagaaaactactacgaa
gtgaatagcaagtgctatgaggaagctaagaagctgaagaagatcagcaaccaggccgagtttatcgcctccttctacaacaacgatctgatcaagatcaacggc
gagctgtatagagtgatcggcgtgaacaacgacctgctgaaccggatcgaagtgaacatgatcgacatcacctaccgcgagtacctggaaaacatgaacgacaa
gaggccccccaggatcattaagacaatcgcctccaagacccagagcattaagaagtacagcacagacattctgggcaacctgtatgaagtgaaatctaagaagc
accctcagatcatcaaaaagggcaaaaggccggcggccacgaaaaaggccggccaggcaaaaaagaaaaagggatccgaggccagcggttccggacggg
ctgacgcattggacgattttgatctggatatgctgggaagtgacgccctcgatgattttgaccttgacatgcttggttcggatgcccttgatgactttgacctcgacatgctcg
gcagtgacgcccttgatgatttcgacctggacatgctgattaactcaagatgatctagacatatggatatctgactagtctcgagtttattgcagcttataatggttacaaat
aaagcaatagcatcacaaatttcacaaataaagcatttttttcactggaccgagcggccgcaggaacccctagtgatggagttggccactccctctctgcgcgctcgct
cgctcactgaggccgggcgaccaaaggtcgcccgacgcccgggctttgcccgggcggcctcagtgagcgagcgagcgcgcagctgcctgcaggggcgcctgat
gcggtattttctccttacgcatctgtgcggtatttcacaccgcatacgtcaaagcaaccatagtacgcgccctgtagcggcgcattaagcgcggcgggtgtggtggttac
gcgcagcgtgaccgctacacttgccagcgccctagcgcccgctcctttcgctttcttcccttcctttctcgccacgttcgccggctttccccgtcaagctctaaatcggggg
ctccctttagggttccgatttagtgctttacggcacctcgaccccaaaaaacttgatttgggtgatggttcacgtagtgggccatcgccctgatagacggtttttcgccctttg
acgttggagtccacgttctttaatagtggactcttgttccaaactggaacaacactcaaccctatctcgggctattcttttgatttataagggattttgccgatttcggcctattg
gttaaaaaatgagctgatttaacaaaaatttaacgcgaattttaacaaaatattaacgtttacaattttatggtgcactctcagtacaatctgctctgatgccgcatagttaa
gccagccccgacacccgccaacacccgctgacgcgccctgacgggcttgtctgctcccggcatccgcttacagacaagctgtgaccgtctccgggagctgcatgtg
tcagaggttttcaccgtcatcaccgaaacgcgcgagacgaaagggcctcgtgatacgcctatttttataggttaatgtcatgataataatggtttcttagacgtcaggtgg
cacttttcggggaaatgtgcgcggaacccctatttgtttatttttctaaatacattcaaatatgtatccgctcatgagacaataaccctgataaatgcttcaataatattgaaa
aaggaagagtatgagtattcaacatttccgtgtcgcccttattcccttttttgcggcattttgccttcctgtttttgctcacccagaaacgctggtgaaagtaaaagatgctga
agatcagttgggtgcacgagtgggttacatcgaactggatctcaacagcggtaagatccttgagagttttcgccccgaagaacgttttccaatgatgagcacttttaaag
ttctgctatgtggcgcggtattatcccgtattgacgccgggcaagagcaactcggtcgccgcatacactattctcagaatgacttggttgagtactcaccagtcacagaa
aagcatcttacggatggcatgacagtaagagaattatgcagtgctgccataaccatgagtgataacactgcggccaacttacttctgacaacgatcggaggaccga
aggagctaaccgcttttttgcacaacatgggggatcatgtaactcgccttgatcgttgggaaccggagctgaatgaagccataccaaacgacgagcgtgacaccac
gatgcctgtagcaatggcaacaacgttgcgcaaactattaactggcgaactacttactctagcttcccggcaacaattaatagactggatggaggcggataaagttgc
aggaccacttctgcgctcggcccttccggctggctggtttattgctgataaatctggagccggtgagcgtgggtctcgcggtatcattgcagcactggggccagatggta
agccccccgtatcgtagttatctacacgacggggagtcaggcaactatggatgaacgaaatagacagatcgctgagataggtgcctcactgattaagcattggtaa
ctgtcagaccaagtttactcatatatactttagattgatttaaaacttcatttttaatttaaaaggatctaggtgaagatcctttttgataatctcatgaccaaaatcccttaacgt
gagttttcgttccactgagcgtcagaccccgtagaaaagatcaaaggatcttcttgagatcctttttttctgcgcgtaatctgctgcttgcaaacaaaaaaaccaccgcta
ccagcggtggtttgtttgccggatcaagagctaccaactctttttccgaaggtaactggcttcagcagagcgcagataccaaatactgtccttctagtgtagccgtagtta
ggccaccacttcaagaactctgtagcaccgcctacatacctcgctctgctaatcctgttaccagtggctgctgccagtggcgataagtcgtgtcttaccgggttggactc
aagacgatagttaccggataaggcgcagcggtcgggctgaacggggggttcgtgcacacagcccagcttggagcgaacgacctacaccgaactgagataccta
cagcgtgagctatgagaaagcgccacgcttcccgaagggagaaaggcggacaggtatccggtaagcggcagggtcggaacaggagagcgcacgagggagc
ttccagggggaaacgcctggtatctttatagtcctgtcgggtttcgccacctctgacttgagcgtcgatttttgtgatgctcgtcaggggggcggagcctatggaaaaacg
ccagcaacgcggcctttttacggttcctggccttttgctggccttttgctcacatgt
pAAV-U6gRNA(Kcna2-sa_sgRNA2)-U6gRNA(Kcnj2-sa_sgRNA2)-CMV-sadCas9-VP64 used in in vitro
experiments (SEQ ID NO: 137)
cctgcaggcagctgcgcgctcgctcgctcactgaggccgcccgggcaaagcccgggcgtcgggcgacctttggtcgcccggcctcagtgagcgagcgagcgcg
cagagagggagtggccaactccatcactaggggttcctgcggccgcacgcgtgagggcctatttcccatgattccttcatatttgcatatacgatacaaggctgttaga
gagataattggaattaatttgactgtaaacacaaagatattagtacaaaatacgtgacgtagaaagtaataatttcttgggtagtttgcagttttaaaattatgttttaaaatg
gactatcatatgcttaccgtaacttgaaagtatttcgatttcttggctttatatatcttgtggaaaggacgaaacaccGCCCCAGCCGGCCCCTTTAATGtttt
agtactctggaaacagaatctactaaaacaaggcaaaatgccgtgtttatctcgtcaacttgttggcgagatttttGGGCCCAAAAAATCTCGCCAACAA
GTTGACGAGATAAACACGGCATTTTGCCTTGTTTTAGTAGATTCTGTTTCCAGAGTACTAAAACCCTGATGGCGG
TTCCCGGGGCGGTGTTTCGTCCTTTCCACAAGATATATAAAGCCAAGAAATCGAAATACTTTCAAGTTACGGTAA
GCATATGATAGTCCATTTTAAAACATAATTTTAAAACTGCAAACTACCCAAGAAATTATTACTTTCTACGTCACGTA
TTTTGTACTAATATCTTTGTGTTTACAGTCAAATTAATTCCAATTATCTCTCTAACAGCCTTGTATCGTATATGCAAA
TATGAAGGAATCATGGGAAATAGGCCCTCCTCCAcgcgtggagttccgcgttacataacttacggtaaatggcccgcctggctgaccgccca
acgacccccgcccattgacgtcaataatgacgtatgttcccatagtaacgccaatagggactttccattgacgtcaatgggtggagtatttacggtaaactgcccacttg
gcagtacatcaagtgtatcatatgccaagtacgccccctattgacgtcaatgacggtaaatggcccgcctggcattatgcccagtacatgaccttatgggactttcctact
tggcagtacatctacgtattagtcatcgctattaccatggtgatgcggttttggcagtacatcaatgggcgtggatagcggtttgactcacggggatttccaagtctccacc
ccattgacgtcaatgggagtttgttttggcaccaaaatcaacgggactttccaaaatgtcgtaacaactccgccccattgacgcaaatgggcggtaggcgtgtacggtg
ggaggtctatataagcagagctcgtttagtgaaccgtcagatcgcctggagacgccatccacgctgttttgacctccatagaagacaccgGAATTCGGTACC
ACCGGTgccaccatggccccaaagaagaagcggaaggtcggtatccacggagtcccagcagccaagcggaactacatcctgggcctggccatcggcatca
ccagcgtgggctacggcatcatcgactacgagacacgggacgtgatcgatgccggcgtgcggctgttcaaagaggccaacgtggaaaacaacgagggcaggc
ggagcaagagaggcgccagaaggctgaagcggcggaggcggcatagaatccagagagtgaagaagctgctgttcgactacaacctgctgaccgaccacagc
gagctgagcggcatcaacccctacgaggccagagtgaagggcctgagccagaagctgagcgaggaagagttctctgccgccctgctgcacctggccaagaga
agaggcgtgcacaacgtgaacgaggtggaagaggacaccggcaacgagctgtccaccaaagagcagatcagccggaacagcaaggccctggaagagaaa
tacgtggccgaactgcagctggaacggctgaagaaagacggcgaagtgcggggcagcatcaacagattcaagaccagcgactacgtgaaagaagccaaaca
gctgctgaaggtgcagaaggcctaccaccagctggaccagagcttcatcgacacctacatcgacctgctggaaacccggcggacctactatgagggacctggcg
agggcagccccttcggctggaaggacatcaaagaatggtacgagatgctgatgggccactgcacctacttccccgaggaactgcggagcgtgaagtacgcctac
aacgccgacctgtacaacgccctgaacgacctgaacaatctcgtgatcaccagggacgagaacgagaagctggaatattacgagaagttccagatcatcgagaa
cgtgttcaagcagaagaagaagcccaccctgaagcagatcgccaaagaaatcctcgtgaacgaagaggatattaagggctacagagtgaccagcaccggcaa
gcccgagttcaccaacctgaaggtgtaccacgacatcaaggacattaccgcccggaaagagattattgagaacgccgagctgctggatcagattgccaagatcct
gaccatctaccagagcagcgaggacatccaggaagaactgaccaatctgaactccgagctgacccaggaagagatcgagcagatctctaatctgaagggctata
ccggcacccacaacctgagcctgaaggccatcaacctgatcctggacgagctgtggcacaccaacgacaaccagatcgctatcttcaaccggctgaagctggtgc
ccaagaaggtggacctgtcccagcagaaagagatccccaccaccctggtggacgacttcatcctgagccccgtcgtgaagagaagcttcatccagagcatcaaa
gtgatcaacgccatcatcaagaagtacggcctgcccaacgacatcattatcgagctggcccgcgagaagaactccaaggacgcccagaaaatgatcaacgaga
tgcagaagcggaaccggcagaccaacgagcggatcgaggaaatcatccggaccaccggcaaagagaacgccaagtacctgatcgagaagatcaagctgca
cgacatgcaggaaggcaagtgcctgtacagcctggaagccatccctctggaagatctgctgaacaaccccttcaactatgaggtggaccacatcatccccagaag
cgtgtccttcgacaacagcttcaacaacaaggtgctcgtgaagcaggaagaagccagcaagaagggcaaccggaccccattccagtacctgagcagcagcgac
agcaagatcagctacgaaaccttcaagaagcacatcctgaatctggccaagggcaagggcagaatcagcaagaccaagaaagagtatctgctggaagaacgg
gacatcaacaggttctccgtgcagaaagacttcatcaaccggaacctggtggataccagatacgccaccagaggcctgatgaacctgctgcggagctacttcaga
gtgaacaacctggacgtgaaagtgaagtccatcaatggcggcttcaccagctttctgcggcggaagtggaagtttaagaaagagcggaacaaggggtacaagca
ccacgccgaggacgccctgatcattgccaacgccgatttcatcttcaaagagtggaagaaactggacaaggccaaaaaagtgatggaaaaccagatgttcgagg
aaaagcaggccgagagcatgcccgagatcgaaaccgagcaggagtacaaagagatcttcatcaccccccaccagatcaagcacattaaggacttcaaggact
acaagtacagccaccgggtggacaagaagcctaatagagagctgattaacgacaccctgtactccacccggaaggacgacaagggcaacaccctgatcgtga
acaatctgaacggcctgtacgacaaggacaatgacaagctgaaaaagctgatcaacaagagccccgaaaagctgctgatgtaccaccacgacccccagaccta
ccagaaactgaagctgattatggaacagtacggcgacgagaagaatcccctgtacaagtactacgaggaaaccgggaactacctgaccaagtactccaaaaag
gacaacggccccgtgatcaagaagattaagtattacggcaacaaactgaacgcccatctggacatcaccgacgactaccccaacagcagaaacaaggtcgtga
agctgtccctgaagccctacagattcgacgtgtacctggacaatggcgtgtacaagttcgtgaccgtgaagaatctggatgtgatcaaaaaagaaaactactacgaa
gtgaatagcaagtgctatgaggaagctaagaagctgaagaagatcagcaaccaggccgagtttatcgcctccttctacaacaacgatctgatcaagatcaacggc
gagctgtatagagtgatcggcgtgaacaacgacctgctgaaccggatcgaagtgaacatgatcgacatcacctaccgcgagtacctggaaaacatgaacgacaa
gaggccccccaggatcattaagacaatcgcctccaagacccagagcattaagaagtacagcacagacattctgggcaacctgtatgaagtgaaatctaagaagc
accctcagatcatcaaaaagggcaaaaggccggcggccacgaaaaaggccggccaggcaaaaaagaaaaagggatccgaggccagcggttccggacggg
ctgacgcattggacgattttgatctggatatgctgggaagtgacgccctcgatgattttgaccttgacatgcttggttcggatgcccttgatgactttgacctcgacatgctcg
gcagtgacgcccttgatgatttcgacctggacatgctgattaactcaagatgatctagacatatggatatctgactagtctcgagtttattgcagcttataatggttacaaat
aaagcaatagcatcacaaatttcacaaataaagcatttttttcactggaccgagcggccgcaggaacccctagtgatggagttggccactccctctctgcgcgctcgct
cgctcactgaggccgggcgaccaaaggtcgcccgacgcccgggctttgcccgggcggcctcagtgagcgagcgagcgcgcagctgcctgcaggggcgcctgat
gcggtattttctccttacgcatctgtgcggtatttcacaccgcatacgtcaaagcaaccatagtacgcgccctgtagcggcgcattaagcgcggcgggtgtggtggttac
gcgcagcgtgaccgctacacttgccagcgccctagcgcccgctcctttcgctttcttcccttcctttctcgccacgttcgccggctttccccgtcaagctctaaatcggggg
ctccctttagggttccgatttagtgctttacggcacctcgaccccaaaaaacttgatttgggtgatggttcacgtagtgggccatcgccctgatagacggtttttcgccctttg
acgttggagtccacgttctttaatagtggactcttgttccaaactggaacaacactcaaccctatctcgggctattcttttgatttataagggattttgccgatttcggcctattg
gttaaaaaatgagctgatttaacaaaaatttaacgcgaattttaacaaaatattaacgtttacaattttatggtgcactctcagtacaatctgctctgatgccgcatagttaa
gccagccccgacacccgccaacacccgctgacgcgccctgacgggcttgtctgctcccggcatccgcttacagacaagctgtgaccgtctccgggagctgcatgtg
tcagaggttttcaccgtcatcaccgaaacgcgcgagacgaaagggcctcgtgatacgcctatttttataggttaatgtcatgataataatggtttcttagacgtcaggtgg
cacttttcggggaaatgtgcgcggaacccctatttgtttatttttctaaatacattcaaatatgtatccgctcatgagacaataaccctgataaatgcttcaataatattgaaa
aaggaagagtatgagtattcaacatttccgtgtcgcccttattcccttttttgcggcattttgccttcctgtttttgctcacccagaaacgctggtgaaagtaaaagatgctga
agatcagttgggtgcacgagtgggttacatcgaactggatctcaacagcggtaagatccttgagagttttcgccccgaagaacgttttccaatgatgagcacttttaaag
ttctgctatgtggcgcggtattatcccgtattgacgccgggcaagagcaactcggtcgccgcatacactattctcagaatgacttggttgagtactcaccagtcacagaa
aagcatcttacggatggcatgacagtaagagaattatgcagtgctgccataaccatgagtgataacactgcggccaacttacttctgacaacgatcggaggaccga
aggagctaaccgcttttttgcacaacatgggggatcatgtaactcgccttgatcgttgggaaccggagctgaatgaagccataccaaacgacgagcgtgacaccac
gatgcctgtagcaatggcaacaacgttgcgcaaactattaactggcgaactacttactctagcttcccggcaacaattaatagactggatggaggcggataaagttgc
aggaccacttctgcgctcggcccttccggctggctggtttattgctgataaatctggagccggtgagcgtgggtctcgcggtatcattgcagcactggggccagatggta
agccctcccgtatcgtagttatctacacgacggggagtcaggcaactatggatgaacgaaatagacagatcgctgagataggtgcctcactgattaagcattggtaa
ctgtcagaccaagtttactcatatatactttagattgatttaaaacttcatttttaatttaaaaggatctaggtgaagatcctttttgataatctcatgaccaaaatcccttaacgt
gagttttcgttccactgagcgtcagaccccgtagaaaagatcaaaggatcttcttgagatcctttttttctgcgcgtaatctgctgcttgcaaacaaaaaaaccaccgcta
ccagcggtggtttgtttgccggatcaagagctaccaactctttttccgaaggtaactggcttcagcagagcgcagataccaaatactgtccttctagtgtagccgtagtta
ggccaccacttcaagaactctgtagcaccgcctacatacctcgctctgctaatcctgttaccagtggctgctgccagtggcgataagtcgtgtcttaccgggttggactc
aagacgatagttaccggataaggcgcagcggtcgggctgaacggggggttcgtgcacacagcccagcttggagcgaacgacctacaccgaactgagataccta
cagcgtgagctatgagaaagcgccacgcttcccgaagggagaaaggcggacaggtatccggtaagcggcagggtcggaacaggagagcgcacgagggagc
ttccagggggaaacgcctggtatctttatagtcctgtcgggtttcgccacctctgacttgagcgtcgatttttgtgatgctcgtcaggggggcggagcctatggaaaaacg
ccagcaacgcggcctttttacggttcctggccttttgctggccttttgctcacatgt
pAAV-U6gRNA(Kcnq2-sa_sgRNA6)-U6gRNA(Kcnq3-sa_sgRNA3)-CMV-sadCas9-VP64 used in in vitro
experiments (SEQ ID NO: 138)
cctgcaggcagctgcgcgctcgctcgctcactgaggccgcccgggcaaagcccgggcgtcgggcgacctttggtcgcccggcctcagtgagcgagcgagcgcg
cagagagggagtggccaactccatcactaggggttcctgcggccgcacgcgtggaggagggcctatttcccatgattccttcatatttgcatatacgatacaaggctgt
tagagagataattggaattaatttgactgtaaacacaaagatattagtacaaaatacgtgacgtagaaagtaataatttcttgggtagtttgcagttttaaaattatgttttaa
aatggactatcatatgcttaccgtaacttgaaagtatttcgatttcttggctttatatatcttgtggaaaggacgaaacaccTCCTAGCCCGGTAATCCTTGA
gttttagtactctggaaacagaatctactaaaacaaggcaaaatgccgtgtttatctcgtcaacttgttggcgagattttttgggcccgaggagggcctatttcccatgattc
cttcatatttgcatatacgatacaaggctgttagagagataattggaattaatttgactgtaaacacaaagatattagtacaaaatacgtgacgtagaaagtaataatttct
tgggtagtttgcagttttaaaattatgttttaaaatggactatcatatgcttaccgtaacttgaaagtatttcgatttcttggctttatatatcttgtggaaaggacgaaacaccg
CTACTGCCGCTGCAGCGGGGCgttttagtactctggaaacagaatctactaaaacaaggcaaaatgccgtgtttatctcgtcaacttgttggcgagattttt
tacgcgtggagttccgcgttacataacttacggtaaatggcccgcctggctgaccgcccaacgacccccgcccattgacgtcaataatgacgtatgttcccatagtaa
cgccaatagggactttccattgacgtcaatgggggagtatttacggtaaactgcccacttggcagtacatcaagtgtatcatatgccaagtacgccccctattgacgtc
aatgacggtaaatggcccgcctggcattatgcccagtacatgaccttatgggactttcctacttggcagtacatctacgtattagtcatcgctattaccatggtgatgcggtt
ttggcagtacatcaatgggcgtggatagcggtttgactcacggggatttccaagtctccaccccattgacgtcaatgggagtttgttttggcaccaaaatcaacgggact
ttccaaaatgtcgtaacaactccgccccattgacgcaaatgggggtaggcgtgtacggtgggaggtctatataagcagagctcgtttagtgaaccgtcagatcgcct
ggagacgccatccacgctgttttgacctccatagaagacaccggaattcggtaccaccggtgccaccatggccccaaagaagaagcggaaggtcggtatccacg
gagtcccagcagccaagcggaactacatcctgggcctggccatcggcatcaccagcgtgggctacggcatcatcgactacgagacacgggacgtgatcgatgcc
ggcgtgcggctgttcaaagaggccaacgtggaaaacaacgagggcaggcggagcaagagaggcgccagaaggctgaagcggggaggcggcatagaatc
cagagagtgaagaagctgctgttcgactacaacctgctgaccgaccacagcgagctgagcggcatcaacccctacgaggccagagtgaagggcctgagccag
aagctgagcgaggaagagttctctgccgccctgctgcacctggccaagagaagaggcgtgcacaacgtgaacgaggtggaagaggacaccggcaacgagctg
tccaccaaagagcagatcagccggaacagcaaggccctggaagagaaatacgtggccgaactgcagctggaacggctgaagaaagacggcgaagtgcggg
gcagcatcaacagattcaagaccagcgactacgtgaaagaagccaaacagctgctgaaggtgcagaaggcctaccaccagctggaccagagcttcatcgaca
cctacatcgacctgctggaaacccggcggacctactatgagggacctggcgagggcagccccttcggctggaaggacatcaaagaatggtacgagatgctgatg
ggccactgcacctacttccccgaggaactgcggagcgtgaagtacgcctacaacgccgacctgtacaacgccctgaacgacctgaacaatctcgtgatcaccagg
gacgagaacgagaagctggaatattacgagaagttccagatcatcgagaacgtgttcaagcagaagaagaagcccaccctgaagcagatcgccaaagaaatc
ctcgtgaacgaagaggatattaagggctacagagtgaccagcaccggcaagcccgagttcaccaacctgaaggtgtaccacgacatcaaggacattaccgccc
ggaaagagattattgagaacgccgagctgctggatcagattgccaagatcctgaccatctaccagagcagcgaggacatccaggaagaactgaccaatctgaac
tccgagctgacccaggaagagatcgagcagatctctaatctgaagggctataccggcacccacaacctgagcctgaaggccatcaacctgatcctggacgagctg
tggcacaccaacgacaaccagatcgctatcttcaaccggctgaagctggtgcccaagaaggggacctgtcccagcagaaagagatccccaccaccctggtgga
cgacttcatcctgagccccgtcgtgaagagaagcttcatccagagcatcaaagtgatcaacgccatcatcaagaagtacggcctgcccaacgacatcattatcgag
ctggcccgcgagaagaactccaaggacgcccagaaaatgatcaacgagatgcagaagcggaaccggcagaccaacgagcggatcgaggaaatcatccgga
ccaccggcaaagagaacgccaagtacctgatcgagaagatcaagctgcacgacatgcaggaaggcaagtgcctgtacagcctggaagccatccctctggaag
atctgctgaacaaccccttcaactatgaggtggaccacatcatccccagaagcgtgtccttcgacaacagcttcaacaacaaggtgctcgtgaagcaggaagaagc
cagcaagaagggcaaccggaccccattccagtacctgagcagcagcgacagcaagatcagctacgaaaccttcaagaagcacatcctgaatctggccaaggg
caagggcagaatcagcaagaccaagaaagagtatctgctggaagaacgggacatcaacaggttctccgtgcagaaagacttcatcaaccggaacctggtggat
accagatacgccaccagaggcctgatgaacctgctgcggagctacttcagagtgaacaacctggacgtgaaagtgaagtccatcaatggcggcttcaccagctttc
tgcggcggaagtggaagtttaagaaagagcggaacaaggggtacaagcaccacgccgaggacgccctgatcattgccaacgccgatttcatcttcaaagagtgg
aagaaactggacaaggccaaaaaagtgatggaaaaccagatgttcgaggaaaagcaggccgagagcatgcccgagatcgaaaccgagcaggagtacaaa
gagatcttcatcaccccccaccagatcaagcacattaaggacttcaaggactacaagtacagccaccgggtggacaagaagcctaatagagagctgattaacga
caccctgtactccacccggaaggacgacaagggcaacaccctgatcgtgaacaatctgaacggcctgtacgacaaggacaatgacaagctgaaaaagctgatc
aacaagagccccgaaaagctgctgatgtaccaccacgacccccagacctaccagaaactgaagctgattatggaacagtacggcgacgagaagaatcccctgt
acaagtactacgaggaaaccgggaactacctgaccaagtactccaaaaaggacaacggccccgtgatcaagaagattaagtattacggcaacaaactgaacgc
ccatctggacatcaccgacgactaccccaacagcagaaacaaggtcgtgaagctgtccctgaagccctacagattcgacgtgtacctggacaatggcgtgtacaa
gttcgtgaccgtgaagaatctggatgtgatcaaaaaagaaaactactacgaagtgaatagcaagtgctatgaggaagctaagaagctgaagaagatcagcaacc
aggccgagtttatcgcctccttctacaacaacgatctgatcaagatcaacggcgagctgtatagagtgatcggcgtgaacaacgacctgctgaaccggatcgaagtg
aacatgatcgacatcacctaccgcgagtacctggaaaacatgaacgacaagaggccccccaggatcattaagacaatcgcctccaagacccagagcattaaga
agtacagcacagacattctgggcaacctgtatgaagtgaaatctaagaagcaccctcagatcatcaaaaagggcaaaaggccggcggccacgaaaaaggccg
gccaggcaaaaaagaaaaagggatccgaggccagcggttccggacgggctgacgcattggacgattttgatctggatatgctgggaagtgacgccctcgatgattt
tgaccttgacatgcttggttcggatgcccttgatgactttgacctcgacatgctcggcagtgacgcccttgatgatttcgacctggacatgctgattaactcaagatgatcta
gacatatggatatctgactagtctcgagtttattgcagcttataatggttacaaataaagcaatagcatcacaaatttcacaaataaagcatttttttcactggaccgagcg
gccgcaggaacccctagtgatggagttggccactccctctctgcgcgctcgctcgctcactgaggccgggcgaccaaaggtcgcccgacgcccgggctttgcccgg
gcggcctcagtgagcgagcgagcgcgcagctgcctgcaggggcgcctgatgcggtattttctccttacgcatctgtgcggtatttcacaccgcatacgtcaaagcaac
catagtacgcgccctgtagcggcgcattaagcgcggcgggtgtggtggttacgcgcagcgtgaccgctacacttgccagcgccctagcgcccgctcctttcgctttctt
cccttcctttctcgccacgttcgccggctttccccgtcaagctctaaatcgggggctccctttagggttccgatttagtgctttacggcacctcgaccccaaaaaacttgattt
gggtgatggttcacgtagtgggccatcgccctgatagacggtttttcgccctttgacgttggagtccacgttctttaatagtggactcttgttccaaactggaacaacactca
accctatctcgggctattcttttgatttataagggattttgccgatttcggcctattggttaaaaaatgagctgatttaacaaaaatttaacgcgaattttaacaaaatattaac
gtttacaattttatggtgcactctcagtacaatctgctctgatgccgcatagttaagccagccccgacacccgccaacacccgctgacgcgccctgacgggcttgtctgc
tcccggcatccgcttacagacaagctgtgaccgtctccgggagctgcatgtgtcagaggttttcaccgtcatcaccgaaacgcgcgagacgaaagggcctcgtgata
cgcctatttttataggttaatgtcatgataataatggtttcttagacgtcaggtggcacttttcggggaaatgtgcgcggaacccctatttgtttatttttctaaatacattcaaat
atgtatccgctcatgagacaataaccctgataaatgcttcaataatattgaaaaaggaagagtatgagtattcaacatttccgtgtcgcccttattcccttttttgcggcatttt
gccttcctgtttttgctcacccagaaacgctggtgaaagtaaaagatgctgaagatcagttgggtgcacgagtgggttacatcgaactggatctcaacagcggtaagat
ccttgagagttttcgccccgaagaacgttttccaatgatgagcacttttaaagttctgctatgtggcgcggtattatcccgtattgacgccgggcaagagcaactcggtcg
ccgcatacactattctcagaatgacttggttgagtactcaccagtcacagaaaagcatcttacggatggcatgacagtaagagaattatgcagtgctgccataaccat
gagtgataacactgcggccaacttacttctgacaacgatcggaggaccgaaggagctaaccgcttttttgcacaacatgggggatcatgtaactcgccttgatcgttgg
gaaccggagctgaatgaagccataccaaacgacgagcgtgacaccacgatgcctgtagcaatggcaacaacgttgcgcaaactattaactggcgaactacttact
ctagcttcccggcaacaattaatagactggatggaggcggataaagttgcaggaccacttctgcgctcggcccttccggctggctggtttattgctgataaatctggagc
cggtgagcgtgggtctcgcggtatcattgcagcactggggccagatggtaagccctcccgtatcgtagttatctacacgacggggagtcaggcaactatggatgaac
gaaatagacagatcgctgagataggtgcctcactgattaagcattggtaactgtcagaccaagtttactcatatatactttagattgatttaaaacttcatttttaatttaaaa
ggatctaggtgaagatcctttttgataatctcatgaccaaaatcccttaacgtgagttttcgttccactgagcgtcagaccccgtagaaaagatcaaaggatcttcttgag
atcctttttttctgcgcgtaatctgctgcttgcaaacaaaaaaaccaccgctaccagcggtggtttgtttgccggatcaagagctaccaactctttttccgaaggtaactgg
cttcagcagagcgcagataccaaatactgtccttctagtgtagccgtagttaggccaccacttcaagaactctgtagcaccgcctacatacctcgctctgctaatcctgtt
accagtggctgctgccagtggcgataagtcgtgtcttaccgggttggactcaagacgatagttaccggataaggcgcagcggtcgggctgaacggggggttcgtgc
acacagcccagcttggagcgaacgacctacaccgaactgagatacctacagcgtgagctatgagaaagcgccacgcttcccgaagggagaaaggcggacag
gtatccggtaagcggcagggtcggaacaggagagcgcacgagggagcttccagggggaaacgcctggtatctttatagtcctgtcgggtttcgccacctctgacttg
agcgtcgatttttgtgatgctcgtcaggggggcggagcctatggaaaaacgccagcaacgcggcctttttacggttcctggccttttgctggccttttgctcacatgt

1. A targeting RNA for use in a method of treating a neurological disorder or disease in a human subject, wherein:
(i) the targeting RNA comprises a first targeting nucleic acid sequence with a specificity for a regulatory sequence of a first endogenous human gene associated with the neurological disorder; and
(ii) the method comprises administering to the subject:
(a) single guide RNA (“sgRNA”), the sgRNA comprising the targeting RNA and a CRISPR nuclease binding region (“tracrRNA”); or
(b) tracrRNA and crisprRNA (“crRNA”), the crRNA comprising the targeting RNA and a binding region for the tracrRNA;
(c) a deactivated CRISPR nuclease (“dCas”); and
(d) a transcriptional activator,
wherein the (i) sgRNA or (ii) crRNA and tracrRNA form a complex with the dCas and transcriptional activator in a cell of the subject, and increase expression of the first endogenous human gene.

2. The targeting RNA for use of claim 1, wherein:
(i) the targeting RNA comprises a second targeting nucleic acid sequence with a specificity for a regulatory sequence of a second endogenous human gene associated with the neurological disorder; and
(ii) the method comprises administering to the subject:
(a) single guide RNA (“sgRNA”), the sgRNA comprising the targeting RNA and a CRISPR nuclease binding region (“tracrRNA”) for each targeting nucleic acid sequence; or
(b) tracrRNA for each targeting nucleic acid sequence and crisprRNA (“crRNA”), the crRNA comprising the targeting RNA and a binding region for a tracrRNA;
(c) a deactivated CRISPR nuclease (“dCas”) for complexing with the targeting nucleic acid sequences; and
(d) a transcriptional activator for complexing with the targeting nucleic acid sequences,
wherein the targeting nucleic acid sequences of the (i) sgRNA or (ii) crRNA and tracrRNA form a complex with a dCas and a transcriptional activator in a cell of the subject, and increase expression of the first and second endogenous human genes.

3. The targeting RNA for use of any one of the above claims, wherein the first targeting RNA sequence and second targeting RNA sequence, when present, target a promoter sequence of the first endogenous human gene and second endogenous human gene respectively.

4. The targeting RNA for use of any one of the above claims, wherein the first endogenous human gene and second endogenous human gene, when present, are selected from the group consisting of: GABRA5, KCNA1, KCNA2, LGI1, KCNC1, KCNMA1, KCNK2, KCNQ2, KCNQ3, KCNJ6, GRM2, GDNF, NPY, NPY2R, GALP, GALR1, PDYN, BDNF, FGF2, GABBR1, GABBR2, GRM3, GRM4, GRM7, GABRR1, GABRR3, OPRK1, OPRM1, OPRD1, OPRL1, KCNJ2, GABRA1, and GABRA2.

5. The targeting RNA for use of any one of the above claims, wherein:
(i) the first human gene is GABRA5, and optionally wherein the second gene is KCNA1;
(ii) the first human gene is KCNQ2, and optionally wherein the second gene is KCNQ3;
(iii) the first human gene is KCNA2, and optionally wherein the second gene is LGI1;
(iv) the first human gene is KNCQ3, and optionally wherein the second gene is LGI1 or,
(v) the first human gene is KCNA2, and optionally wherein the second gene is KCNJ2.

6. The targeting RNA for use of any one of the above claims, wherein:
(i) the first targeting nucleic acid sequence has at least 70% or more sequence identity to a sequence selected from SEQ ID NOs: 1-3, 13, 49-55, 63-65, 69-71, 75-80, 87-89, 93-95, 99-101, 105-107, 111-113, and 117-119; and/or
(ii) the second targeting nucleic acid sequence, when present, has at least 70% or more sequence identity to SEQ ID NO: 1-3, 13, 49-55, 63-65, 69-71, 75-80, 87-89, 93-95, 99-101, 105-107, 111-113, and 117-119, preferably wherein the first targeting nucleic acid sequence is selected from SEQ ID NOs: 64, 70, 79, 89, and 106.

7. The targeting RNA for use of any one of the above claims, wherein:
(i) the first targeting nucleic acid sequence comprises or consists of a sequence selected from SEQ ID NOs:
1-3, 13, 49-55, 63-65, 69-71, 75-80, 87-89, 93-95, 99-101, 105-107, 111-113, and 117-119; and/or
(ii) the second targeting nucleic acid sequence, when present, comprises or consists of SEQ ID NO: 1-3, 13, 49-55, 63-65, 69-71, 75-80, 87-89, 93-95, 99-101, 105-107, 111-113, and 117-119,
preferably wherein the first targeting nucleic acid sequence is selected from SEQ ID NOs: 64, 70, 79, 89, and 106.

8. The targeting RNA for use of any one of claims 2-7, wherein the first endogenous human gene and second endogenous human gene are associated with different mechanisms of action of control of neural activity.

9. The targeting RNA for use of any one of claims 2-8, wherein the first endogenous human gene is associated with action potential inhibition and synaptic vesicle release, and the second endogenous human gene is associated with tonic inhibition.

10. The targeting RNA for use of any one of claims 2-9, wherein
(i) the first endogenous human gene is KCNA1 and the second endogenous human gene is GABRA5;
(ii) the first human gene is KCNQ2, and optionally wherein the second gene is KCNQ3;
(iii) the first human gene is KCNA2, and optionally wherein the second gene is LGI1;
(iv) the first human gene is KNCQ3, and optionally wherein the second gene is LGI1; or
(v) the first human gene is KCNA2, and optionally wherein the second gene is KCNJ2.

11. The targeting RNA for use of any one of the above claims, wherein the dCas is dCas9, optionally wherein the dCas9 is S. aureus dCas9 (“sadCas9”) or S. pyogenes dCas9 (“spdCas9”).

12. The targeting RNA for use of any one of the claims 1-10, wherein the dCas is dCas12.

13. The targeting RNA for use of any one of the above claims, wherein the dCas is fused to the transcriptional activator.

14. The targeting RNA for use of claim 13, wherein the dCas is fused to a transcriptional activator domain.

15. The targeting RNA for use of claim 14, wherein the transcriptional activator domain is VP64.

16. The targeting RNA for use of claim 14, wherein the transcriptional activator domain is VP160 or VP16.

17. The targeting RNA for use of any one of the above claims, wherein the disorder is associated with haploinsufficiency.

18. The targeting RNA for use of any one of the above claims, wherein the neurological disorder is a seizure disorder, optionally wherein the seizure disorder is epilepsy, optionally neocortical epilepsy, temporal lobe epilepsy or refractory epilepsy.

19. The targeting RNA for use of any one of the above claims, wherein the neurological disorder is Parkinson's disease, chronic pain, sudden unexpected death in epilepsy (SUDEP), migraine, cluster headache, trigeminal neuralgia, post-herpetic neuralgia, paroxysmal movement disorders, uni- or bipolar affective disorders, anxiety, or phobias.

20. A crRNA for use in a method of treating a neurological disorder in a human subject, comprising the targeting RNA as defined in any one of the above claims, and a region for complexing to a CRISPR nuclease binding region (“tracrRNA”).

21. A guide RNA system for use in a method of treating a neurological disorder in a human subject, comprising the crRNA for use of any one of the above claims and a tracrRNA.

22. A single guide RNA (“sgRNA”) for use in a method of treating a neurological disorder in a human subject, comprising the targeting RNA or crRNA for use as defined in any one of the above claims, and a tracrRNA.

23. A composition for use in a method of treating a neurological disorder in a human subject, comprising the sgRNA for use of any one of the above claims, a deactivated CRISPR nuclease (“dCas”) as defined in any one of the above claims, and a transcriptional activator as defined in any one of the above claims, optionally wherein the dCas is fused to the transcriptional activator.

24. An expression vector system for use in a method of treating a neurological disorder in a human subject, comprising:
(a) (i) a first vector comprising a polynucleotide sequence encoding a sgRNA for use of any one of the above claims; and
either
(ii) a second vector comprising a polynucleotide sequence encoding a deactivated CRISPR nuclease as defined in any one of the above claims fused to a transcriptional activator as defined in any one of the above claims; or
(iii) a second vector comprising a polynucleotide sequence encoding a deactivated CRISPR nuclease as defined in any one of the above claims, and a third vector comprising a polynucleotide sequence encoding a transcriptional activator as defined in any one of the above claims;
or
(b) (i) a first vector comprising a polynucleotide sequence encoding the crRNA for use of any one of the above claims;
(ii) a second vector comprising a polynucleotide sequence encoding a tracrRNA as defined in any one of the above claims;
and either
(iii) a third vector comprising a polynucleotide sequence encoding a deactivated CRISPR nuclease as defined in any one of the above claims fused to a transcriptional activator as defined in any one of the above claims; or
(iv) a third vector comprising a polynucleotide sequence encoding a deactivated CRISPR nuclease as defined in any one of the above claims, and a fourth vector comprising a polynucleotide sequence encoding a transcriptional activator as defined in any one of the above claims.

25. An expression vector for use in a method of treating a neurological disorder in a human subject, comprising:
(i) a polynucleotide sequence encoding a crRNA for use of any one of the above claims;
(ii) a polynucleotide sequence encoding a tracrRNA as defined in of any one of the above claims;
and either
(iii) a polynucleotide sequence encoding a deactivated CRISPR nuclease as defined in any one of the above claims fused to a transcriptional activator as defined in any one of the above claims; or
(iv) a polynucleotide sequence encoding a deactivated CRISPR nuclease as defined in any one of the above claims and a polynucleotide sequence encoding a transcriptional activator as defined in any one of the above claims.

26. An expression vector system for use in a method of treating a neurological disorder in a human subject, comprising:
(i) a first vector comprising a polynucleotide sequence encoding a first sgRNA for use of any one of the above claims wherein the targeting RNA only targets a first endogenous human gene;
(ii) a second vector comprising a polynucleotide sequence encoding a second sgRNA for use of any one of the above claims, wherein the targeting RNA only targets a second endogenous human gene;
and either
(iii) a third vector comprising a polynucleotide sequence encoding a deactivated CRISPR nuclease as defined in any one of the above claims fused to a transcriptional activator as defined in any one of the above claims; or
(iv) a third vector comprising a polynucleotide sequence encoding a deactivated CRISPR nuclease as defined in any one of the above claims and a fourth vector comprising a polynucleotide sequence encoding to a transcriptional activator as defined in any one of the above claims.

27. An expression vector or expression vector system wherein:
(i) the expression vector or expression vector system for use is according to claim 23 or 24, and wherein the polynucleotide sequence encoding the crRNA or sgRNA is operably linked to an RNA polymerase III promoter, optionally a U6 promoter; or
(ii) the expression vector or expression vector system for use is according to claim 25, and wherein the polynucleotide sequence encoding the first and second sgRNAs are, separately or collectively, operably linked to an RNA polymerase Ill promoter, optionally a U6 promoter.

28. The expression vector or expression vector system for use of any one of the above claims, wherein the polynucleotide sequence encoding the deactivated CRISPR nuclease is operably linked to an EF-1a promoter or CMV promoter, or a CaMKII promoter.

29. The expression vector or expression vector system for use of any one of the above claims, comprising a nucleotide sequence having at least 70% or more sequence identity to a sequence selected from SEQ ID NOs: 6, 8-10, 56-62, 72-74, 81-86, 90-92, 96-98, 102-104, 108-110, 114-116, 120-122, 124-129, or 131-138.

30. The expression vector or expression vector system for use of any one of the above claims, comprising a nucleotide sequence comprising or consisting of a sequence selected from SEQ ID NOs: 6, 8-10, 56-62, 72-74, 81-86, 90-92, 96-98, 102-104, 108-110, 114-116, 120-122, 124-129, or 131-138.

31. A human regulatory sequence for the design of a targeting RNA as defined in any one of the above claims, the regulatory sequence consisting of a sequence of any one of SEQ ID NOs: 14-46.

32. A targeting RNA comprising a targeting nucleic acid sequence with a specificity for a human regulatory sequence of claim 31.

33. An in vitro method of making viral particles comprising:
(i) transducing mammalian cells with an expression vector or expression vector system for use according to any one of the above claims and expressing viral packaging and envelope proteins necessary for particle formation in the cells; and
(ii) culturing the transduced cells in a culture medium, such that the cells produce viral particles that are released into the medium.

34. A kit comprising an expression vector or expression vector system for use of any one of the above claims and one or more viral packaging and envelope expression vectors that encode viral packaging and envelope proteins necessary for particle formation when expressed in a cell.

35. A method of treatment of a neurological disorder as defined in any one of the above claims, comprising administering to an individual with the neurological disorder the expression vector or vector system for use as defined in any one of the above claims.

36. A method of determining the expression of a first and/or second endogenous human gene as defined in any one of the above claims, the method comprising:
(i) transducing a cell with an expression vector or expression vector system of any one of the above claims or administering a viral particle of any one of the above claims to a cell under conditions that permit expression of the first human gene and/or second gene;
(ii) measuring the amount of the expression product of the first human gene and/or second gene, and comparing it to the amount of the expression product of the first human gene and/or second gene in a cell not transduced with expression vector, expression vector system or viral particle.

37. A cell comprising the expression vector or expression vector system of any one of the above claims.

38. A targeting RNA comprising a first targeting nucleic acid sequence with a specificity for a first endogenous human gene associated with the neurological disorder, wherein the first targeting nucleic acid sequence is encoded by a sequence as defined in any one of the above.

39. A targeting RNA comprising a first targeting nucleic acid sequence with a specificity for a first endogenous human gene associated with the neurological disorder, and a second targeting nucleic acid sequence with a specificity for a second endogenous human gene associated with the neurological disorder, wherein the first and second targeting nucleic acid sequence are separately encoded by a sequence as defined in any one of the above claims.

The application's sequence listing, which the Patent Office published only in electronic form, follows.

SEQUENCE LISTING (138 sequences)

SEQ ID NO: 1 - RNA, 20 nt, synthetic construct
  source 1..20: mol_type = other RNA
gagcgagcgcgagtccgccg

SEQ ID NO: 2 - RNA, 20 nt, synthetic construct
  source 1..20: mol_type = other RNA
ggtgactagcgattattcca

SEQ ID NO: 3 - RNA, 20 nt, synthetic construct
  source 1..20: mol_type = other RNA
aacatggtctttcccgaagc

SEQ ID NO: 4 - RNA, 20 nt, synthetic construct
  source 1..20: mol_type = other RNA
tgcgaatacgcccacgcgat

SEQ ID NO: 5 - DNA, 7729 bp, synthetic construct
  source 1..7729: mol_type = other DNA
cctgcaggcagctgcgcgctcgctcgctcactgaggccgcccgggcaaagcccgggcgtcgggcgacctttggtcgcccggcctcagtgagcgagcgagcgcgcagagagggagtggccaactccatcactaggggttcctgcggcctctagaccagtttggttagatctcgagtttaccactccctatcagtgatagagaaaagtgaaagtcgagtttaccactccctatcagtgatagagaaaagtgaaagtcgagtttaccactccctatcagtgatagagaaaagtgaaagtcgagtttaccactccctatcagtgatagagaaaagtgaaagtcgagtttaccactccctatcagtgatagagaaaagtgaaagtcgagtttaccactccctatcagtgatagagaaaagtgaaagtcgagtttaccactccctatcagtgatagagaaaagtgaaagtcgagctcggtacccgggtcgagtaggcgtgtacggtgggaggcctatataagcagagctcgtttagtgaaccgtcagatcgcaccggtgtcgactctagagccaccatgcccaagaagaagaggaaggtgggaagggggatggacaagaagtactccattgggctcgctatcggcacaaacagcgtcggctgggccgtcattacggacgagtacaaggtgccgagcaaaaaattcaaagttctgggcaataccgatcgccacagcataaagaagaacctcattggcgccctcctgttcgactccggggagacggccgaagccacgcggctcaaaagaacagcacggcgcagatatacccgcagaaagaatcggatctgctacctgcaggagatctttagtaatgagatggctaaggtggatgactctttcttccataggctggaggagtcctttttggtggaggaggataaaaagcacgagcgccacccaatctttggcaatatcgtggacgaggtggcgtaccatgaaaagtacccaaccatatatcatctgaggaagaagcttgtagacagtactgataaggctgacttgcggttgatctatctcgcgctggcgcatatgatcaaatttcggggacacttcctcatcgagggggacctgaacccagacaacagcgatgtcgacaaactctttatccaactggttcagacttacaatcagcttttcgaagagaacccgatcaacgcatccggagttgacgccaaagcaatcctgagcgctaggctgtccaaatcccggcggctcgaaaacctcatcgcacagctccctggggagaagaagaacggcctgtttggtaatcttatcgccctgtcactcgggctgacccccaactttaaatctaacttcgacctggccgaagatgccaagcttcaactgagcaaagacacctacgatgatgatctcgacaatctgctggcccagatcggcgaccagtacgcagacctttttttggcggcaaagaacctgtcagacgccattctgctgagtgatattctgcgagtgaacacggagatcaccaaagctccgctgagcgctagtatgatcaagcgctatgatgagcaccaccaagacttgactttgctgaaggcccttgtcagacagcaactgcctgagaagtacaaggaaattttcttcgatcagtctaaaaatggctacgccggatacattgacggcggagcaagccaggaggaattttacaaatttattaagcccatcttggaaaaaatggacggcaccgaggagctgctggtaaagcttaacagagaagatctgttgcgcaaacagcgcactttcgacaatggaagcatcccccaccagattcacctgggcgaactgcacgctatcctcaggcggcaagaggatttctacccctttttgaaagataacagggaaaagattgagaaaatcctcacatttcggataccctactatgtaggccccctcgcccggggaaattccagattcgcgtggatgactcgcaaatcagaagagaccatcactccctggaacttcgaggaagtcgtggataagggggcctctgcccagtccttcatcgaaaggatgactaactttgataaaaatctgcctaacgaaaaggtgcttcctaaacactctctgctgtacgagtacttcacagtttataacgagctcaccaaggtcaaatacgtcacagaagggatgagaaagccagcattcctgtctggagagcagaagaaagctatcgtggacctcctcttcaagacgaaccggaaagttaccgtgaaacagctcaaagaagactatttcaaaaagattgaatgtttcgactctgttgaaatcagcggagtggaggatcgcttcaacgcatccctgggaacgtatcacgatctcctgaaaatcattaaagacaaggacttcctggacaatgaggagaacgaggacattcttgaggacattgtcctcacccttacgttgtttgaagatagggagatgattgaagaacgcttgaaaacttacgctcatctcttcgacgacaaagtcatgaaacagctcaagaggcgccgatatacaggatgggggcggctgtcaagaaaactgatcaatgggatccgagacaagcagagtggaaagacaatcctggattttcttaagtccgatggatttgccaaccggaacttcatgcagttgatccatgatgactctctcacctttaaggaggacatccagaaagcacaagtttctggccagggggacagtcttcacgagcacatcgctaatcttgcaggtagcccagctatcaaaaagggaatactgcagaccgttaaggtcgtggatgaactcgtcaaagtaatgggaaggcataagcccgagaatatcgttatcgagatggcccgagagaaccaaactacccagaagggacagaagaacagtagggaaaggatgaagaggattgaagagggtataaaagaactggggtcccaaatccttaaggaacacccagttgaaaacacccagcttcagaatgagaagctctacctgtactacctgcagaacggcagggacatgtacgtggatcaggaactggacatcaatcggctctccgactacgacgtggctgctatcgtgccccagtcttttctcaaagatgattctattgataataaagtgttgacaagatccgataaagctagagggaagagtgataacgtcccctcagaagaagttgtcaagaaaatgaaaaattattggcggcagctgctgaacgccaaactgatcacacaacggaagttcgataatctgactaaggctgaacgaggtggcctgtctgagttggataaagccggcttcatcaaaaggcagcttgttgagacacgccagatcaccaagcacgtggcccaaattctcgattcacgcatgaacaccaagtacgatgaaaatgacaaactgattcgagaggtgaaagttattactctgaagtctaagctggtctcagatttcagaaaggactttcagttttataaggtgagagagatcaacaattaccaccatgcgcatgatgcctacctgaatgcagtggtaggcactgcacttatcaaaaaatatcccaagcttgaatctgaatttgtttacggagactataaagtgtacgatgttaggaaaatgatcgcaaagtctgagcaggaaataggcaaggccaccgctaagtacttcttttacagcaatattatgaattttttcaagaccgagattacactggccaatggagagattcggaagcgaccacttatcgaaacaaacggagaaacaggagaaatcgtgtgggacaagggtagggatttcgcgacagtccggaaggtcctgtccatgccgcaggtgaacatcgttaaaaagaccgaagtacagaccggaggcttctccaaggaaagtatcctcccgaaaaggaacagcgacaagctgatcgcacgcaaaaaagattgggaccccaagaaatacggcggattcgattctcctacagtcgcttacagtgtactggttgtggccaaagtggagaaagggaagtctaaaaaactcaaaagcgtcaaggaactgctgggcatcacaatcatggagcgatcaagcttcgaaaaaaaccccatcgactttctcgaggcgaaaggatataaagaggtcaaaaaagacctcatcattaagcttcccaagtactctctctttgagcttgaaaacggccggaaacgaatgctcgctagtgcgggcgagctgcagaaaggtaacgagctggcactgccctctaaatacgttaatttcttgtatctggccagccactatgaaaagctcaaagggtctcccgaagataatgagcagaagcagctgttcgtggaacaacacaaacactaccttgatgagatcatcgagcaaataagcgaattctccaaaagagtgatcctcgccgacgctaacctcgataaggtgctttctgcttacaataagcacagggataagcccatcagggagcaggcagaaaacattatccacttgtttactctgaccaacttgggcgcgcctgcagccttcaagtacttcgacaccaccatagacagaaagcggtacacctctacaaaggaggtcctggacgccacactgattcatcagtcaattacggggctctatgaaacaagaatcgacctctctcagctcggtggagacagcagggctgaccccaagaagaagaggaaggtggaggccagcggttccggacgggctgacgcattggacgattttgatctggatatgctgggaagtgacgccctcgatgattttgaccttgacatgcttggttcggatgcccttgatgactttgacctcgacatgctcggcagtgacgcccttgatgatttcgacctggacatgctgattaactctagataagaattcaataaaagatctttattttcattagatctgtgtgttggttttttgtgtgcggccgcaggaacccctagtgatggagttggccactccctctctgcgcgctcgctcgctcactgaggccgggcgaccaaaggtcgcccgacgcccgggctttgcccgggcggcctcagtgagcgagcgagcgcgcagctgcctgcaggggcgcctgatgcggtattttctccttacgcatctgtgcggtatttcacaccgcatacgtcaaagcaaccatagtacgcgccctgtagcggcgcattaagcgcggcgggtgtggtggttacgcgcagcgtgaccgctacacttgccagcgccctagcgcccgctcctttcgctttcttcccttcctttctcgccacgttcgccggctttccccgtcaagctctaaatcgggggctccctttagggttccgatttagtgctttacggcacctcgaccccaaaaaacttgatttgggtgatggttcacgtagtgggccatcgccctgatagacggtttttcgccctttgacgttggagtccacgttctttaatagtggactcttgttccaaactggaacaacactcaaccctatctcgggctattcttttgatttataagggattttgccgatttcggcctattggttaaaaaatgagctgatttaacaaaaatttaacgcgaattttaacaaaatattaacgtttacaattttatggtgcactctcagtacaatctgctctgatgccgcatagttaagccagccccgacacccgccaacacccgctgacgcgccctgacgggcttgtctgctcccggcatccgcttacagacaagctgtgaccgtctccgggagctgcatgtgtcagaggttttcaccgtcatcaccgaaacgcgcgagacgaaagggcctcgtgatacgcctatttttataggttaatgtcatgataataatggtttcttagacgtcaggtggcacttttcggggaaatgtgcgcggaacccctatttgtttatttttctaaatacattcaaatatgtatccgctcatgagacaataaccctgataaatgcttcaataatattgaaaaaggaagagtatgagtattcaacatttccgtgtcgcccttattcccttttttgcggcattttgccttcctgtttttgctcacccagaaacgctggtgaaagtaaaagatgctgaagatcagttgggtgcacgagtgggttacatcgaactggatctcaacagcggtaagatccttgagagttttcgccccgaagaacgttttccaatgatgagcacttttaaagttctgctatgtggcgcggtattatcccgtattgacgccgggcaagagcaactcggtcgccgcatacactattctcagaatgacttggttgagtactcaccagtcacagaaaagcatcttacggatggcatgacagtaagagaattatgcagtgctgccataaccatgagtgataacactgcggccaacttacttctgacaacgatcggaggaccgaaggagctaaccgcttttttgcacaacatgggggatcatgtaactcgccttgatcgttgggaaccggagctgaatgaagccataccaaacgacgagcgtgacaccacgatgcctgtagcaatggcaacaacgttgcgcaaactattaactggcgaactacttactctagcttcccggcaacaattaatagactggatggaggcggataaagttgcaggaccacttctgcgctcggcccttccggctggctggtttattgctgataaatctggagccggtgagcgtggaagccgcggtatcattgcagcactggggccagatggtaagccctcccgtatcgtagttatctacacgacggggagtcaggcaactatggatgaacgaaatagacagatcgctgagataggtgcctcactgattaagcattggtaactgtcagaccaagtttactcatatatactttagattgatttaaaacttcatttttaatttaaaaggatctaggtgaagatcctttttgataatctcatgaccaaaatcccttaacgtgagttttcgttccactgagcgtcagaccccgtagaaaagatcaaaggatcttcttgagatcctttttttctgcgcgtaatctgctgcttgcaaacaaaaaaaccaccgctaccagcggtggtttgtttgccggatcaagagctaccaactctttttccgaaggtaactggcttcagcagagcgcagataccaaatactgtccttctagtgtagccgtagttaggccaccacttcaagaactctgtagcaccgcctacatacctcgctctgctaatcctgttaccagtggctgctgccagtggcgataagtcgtgtcttaccgggttggactcaagacgatagttaccggataaggcgcagcggtcgggctgaacggggggttcgtgcacacagcccagcttggagcgaacgacctacaccgaactgagatacctacagcgtgagctatgagaaagcgccacgcttcccgaagggagaaaggcggacaggtatccggtaagcggcagggtcggaacaggagagcgcacgagggagcttccagggggaaacgcctggtatctttatagtcctgtcgggtttcgccacctctgacttgagcgtcgatttttgtgatgctcgtcaggggggcggagcctatggaaaaacgccagcaacgcggcctttttacggttcctggccttttgctggccttttgctcacatgt

SEQ ID NO: 6 - RNA, 6984 nt, synthetic construct
  source 1..6984: mol_type = other RNA
taacattatggccttaggtcacttcatctccatggggttcttcttctgattttctagaaaatgagatgggggtgcagagagcttcctcagtgacctgcccagggtcacatcagaaatgtcagagctagaacttgaactcagattactaatcttaaattccatgccttgggggcatgcaagtacgatatacagaaggagtgaactcattagggcagatgaccaatgagtttaggaaagaagagtccagggcagggtacatctacaccacccgcccagccctgggtgagtccagccacgttcacctcattatagttgcctctctccagtcctaccttgacgggaagcacaagcagaaactgggacaggagccccaggagaccaaatcttcatggtccctctgggaggatgggtggggagagctgtggcagaggcctcaggaggggccctgctgctcagtggtgacagataggggtgagaaagcagacagagtcattccgtcagcattctgggtctgtttggtacttcttctcacgctaaggtggcggtgtgatatgcacaatggctaaaaagcagggagagctggaaagaaacaaggacagagacagaggccaagtcaaccagaccaattcccagaggaagcaaagaaaccattacagagactacaagggggaagggaaggagagatgaattagcttcccctgtaaaccttagaacccagctgttgccagggcaacggggcaatacctgtctcttcagaggagatgaagttgccagggtaactacatcctgtctttctcaaggaccatcccagaatgtggcacccactagccgttaccatagcaactgcctctttgccccacttaatcccatcccgtctgttaaaagggccctatagttggaggtgggggaggtaggaagagcgatgatcacttgtggactaagtttgttcgcatccccttctccaaccccctcagtacatcaccctgggggaacagggtccacttgctcctgggcccacacagtcctgcagtattgtgtatataaggccagggcaaagaggagcaggttttaaagtgaaaggcaggcaggtgttggggaggcagttaccggggcaacgggaacagggcgtttcggaggtggttgccatggggacctggatgctgacgaaggctcgcgaggctgtgagcagccacagtgccctgctcagaagccccaagctcgtcagtcaagccggttctccgtttgcactcaggagcacgggcaggcgagtggcccctagttctgggggcagcggtaccgccaccatgtctagactggacaagagcaaagtcataaacggcgctctggaattactcaatggagtcggtatcgaaggcctgacgacaaggaaactcgctcaaaagctgggagttgagcagcctaccctgtactggcacgtgaagaacaagcgggccctgctcgatgccctgccaatcgagatgctggacaggcatcatacccacttctgccccctggaaggcgagtcatggcaagactttctgcggaacaacgccaagtcattccgctgtgctctcctctcacatcgcgacggggctaaagtgcatctcggcacccgcccaacagagaaacagtacgaaaccctggaaaatcagctcgcgttcctgtgtcagcaaggcttctccctggagaacgcactgtacgctctgtccgccgtgggccactttacactgggctgcgtattggaggaacaggagcatcaagtagcaaaagaggaaagagagacacctaccaccgattctatgcccccacttctgagacaagcaattgagctgttcgaccggcagggagccgaacctgccttccttttcggcctggaactaatcatatgtggcctggagaaacagctaaagtgcgaaagcggcgggccggccgacgcccttgacgattttgacttagacatgctcccagccgatgcccttgacgactttgaccttgatatgctgcctgctgacgctcttgacgattttgaccttgacatgctccccgggggatccgctgagggtcggggctctctgctcacatgtggcgacgtcgaggagaatcccggaccggccccggggtcgacaatggtgtctaagggtgaggaagtaattaaggagtttatgagattcaaagttagaatggagggtagcatgaacgggcacgagtttgaaattgaaggtgagggtgaaggaagaccatatgagggcacacaaaccgccaagctcaaggttaccaaaggtggcccccttcctttcgcctgggacatcctcagccctcaattcatgtacggtagcaaggcttacgtcaaacaccctgctgatatacctgattacaaaaaactgtcatttcctgaaggatttaagtgggaacgagtaatgaattttgaggatggtgggctggtcactgtcacgcaagactcctctctgcaggacggcaccctgatttacaaggtgaagatgcgcggaacaaattttccccccgatggccccgtgatgcagaagaagaccatggggtgggaggcctctacagaacgactgtacccccgcgatggcgttcttaaaggcgaaatccatcaggcgcttaaactcaaagatggcgggcactacctggttgagttcaaaactatatatatggccaaaaagccggttcagctgcctggctactactacgtggacaccaagttggacatcacgagtcacaacgaggactacacaatcgtcgagcagtacgaacgctcagaaggtcggcatcacctgttcttgtatggcatggatgagctgtataagtaaatcgataccgagcgctgctcgagagatctacgggtggcatccctgtgacccctccccagtgcctctcctggccctggaagttgccactccagtgcccaccagccttgtcctaataaaattaagttgcatcattttgtctgactaggtgtccttctataatattatggggtggaggggggtggtatggagcaaggggcaagttgggaagacaacctgtagggcctgcggggtctattgggaaccaagctggagtgcagtggcacaatcttggctcactgcaatctccgcctcctgggttcaagcgattctcctgcctcagcctcccgagttgttgggattccaggcatgcatgaccaggctcagctaatttttgtttttttggtagagacggggtttcaccatattggccaggctggtctccaactcctaatctcaggtgatctacccaccttggcctcccaaattgctgggattacaggcgtgaaccactgctcccttccctgtccttctgattttgtaggtaaccacgtgcggaccgagcggccgcaggaacccctagtgatggagttggccactccctctctgcgcgctcgctcgctcactgaggccgggcgaccaaaggtcgcccgacgcccgggctttgcccgggcggcctcagtgagcgagcgagcgcgcagctgcctgcaggggcgcctgatgcggtattttctccttacgcatctgtgcggtatttcacaccgcatacgtcaaagcaaccatagtacgcgccctgtagcggcgcattaagcgcggcgggtgtggtggttacgcgcagcgtgaccgctacacttgccagcgccctagcgcccgctcctttcgctttcttcccttcctttctcgccacgttcgccggctttccccgtcaagctctaaatcgggggctccctttagggttccgatttagtgctttacggcacctcgaccccaaaaaacttgatttgggtgatggttcacgtagtgggccatcgccctgatagacggtttttcgccctttgacgttggagtccacgttctttaatagtggactcttgttccaaactggaacaacactcaaccctatctcgggctattcttttgatttataagggattttgccgatttcggcctattggttaaaaaatgagctgatttaacaaaaatttaacgcgaattttaacaaaatattaacgtttacaattttatggtgcactctcagtacaatctgctctgatgccgcatagttaagccagccccgacacccgccaacacccgctgacgcgccctgacgggcttgtctgctcccggcatccgcttacagacaagctgtgaccgtctccgggagctgcatgtgtcagaggttttcaccgtcatcaccgaaacgcgcgagacgaaagggcctcgtgatacgcctatttttataggttaatgtcatgataataatggtttcttagacgtcaggtggcacttttcggggaaatgtgcgcggaacccctatttgtttatttttctaaatacattcaaatatgtatccgctcatgagacaataaccctgataaatgcttcaataatattgaaaaaggaagagtatgagtattcaacatttccgtgtcgcccttattcccttttttgcggcattttgccttcctgtttttgctcacccagaaacgctggtgaaagtaaaagatgctgaagatcagttgggtgcacgagtgggttacatcgaactggatctcaacagcggtaagatccttgagagttttcgccccgaagaacgttttccaatgatgagcacttttaaagttctgctatgtggcgcggtattatcccgtattgacgccgggcaagagcaactcggtcgccgcatacactattctcagaatgacttggttgagtactcaccagtcacagaaaagcatcttacggatggcatgacagtaagagaattatgcagtgctgccataaccatgagtgataacactgcggccaacttacttctgacaacgatcggaggaccgaaggagctaaccgcttttttgcacaacatgggggatcatgtaactcgccttgatcgttgggaaccggagctgaatgaagccataccaaacgacgagcgtgacaccacgatgcctgtagcaatggcaacaacgttgcgcaaactattaactggcgaactacttactctagcttcccggcaacaattaatagactggatggaggcggataaagttgcaggaccacttctgcgctcggcccttccggctggctggtttattgctgataaatctggagccggtgagcgtgggtctcgcggtatcattgcagcactggggccagatggtaagccctcccgtatcgtagttatctacacgacggggagtcaggcaactatggatgaacgaaatagacagatcgctgagataggtgcctcactgattaagcattggtaactgtcagaccaagtttactcatatatactttagattgatttaaaacttcatttttaatttaaaaggatctaggtgaagatcctttttgataatctcatgaccaaaatcccttaacgtgagttttcgttccactgagcgtcagaccccgtagaaaagatcaaaggatcttcttgagatcctttttttctgcgcgtaatctgctgcttgcaaacaaaaaaaccaccgctaccagcggtggtttgtttgccggatcaagagctaccaactctttttccgaaggtaactggcttcagcagagcgcagataccaaatactgtccttctagtgtagccgtagttaggccaccacttcaagaactctgtagcaccgcctacatacctcgctctgctaatcctgttaccagtggctgctgccagtggcgataagtcgtgtcttaccgggttggactcaagacgatagttaccggataaggcgcagcggtcgggctgaacggggggttcgtgcacacagcccagcttggagcgaacgacctacaccgaactgagatacctacagcgtgagctatgagaaagcgccacgcttcccgaagggagaaaggcggacaggtatccggtaagcggcagggtcggaacaggagagcgcacgagggagcttccagggggaaacgcctggtatctttatagtcctgtcgggtttcgccacctctgacttgagcgtcgatttttgtgatgctcgtcaggggggcggagcctatggaaaaacgccagcaacgcggcctttttacggttcctggccttttgctggccttttgctcacatgtcctgcaggcagctgcgcgctcgctcgctcactgaggccgcccgggcaaagcccgggcgtcgggcgacctttggtcgcccggcctcagtgagcgagcgagcgcgcagagagggagtggccaactccatcactaggggttcctgcggccgcacgcgtgagggcctatttcccatgattccttcatatttgcatatacgatacaaggctgttagagagataattggaattaatttgactgtaaacacaaagatattagtacaaaatacgtgacgtagaaagtaataatttcttgggtagtttgcagttttaaaattatgttttaaaatggactatcatatgcttaccgtaacttgaaagtatttcgatttcttggctttatatatcttgtggaaaggacgaaacaccagtcaatgatcacatcctccgttttagagctagaaatagcaagttaaaataaggctagtccgttatcaacttgaaaaagtggcaccgagtcggtgctttttttctagcttagagggcctatttcccatgattccttcatatttgcatatacgatacaaggctgttagagagataattagaattaatttgactgtaaacacaaagatattagtacaaaatacgtgacgtagaaagtaataatttcttgggtagtttgcagttttaaaattatgttttaaaatggactatcatatgcttaccgtaacttgaaagtatttcgatttcttggctttatatatcttgtggaaaggacgaaacaccgaacatggtctttcccgaagcgttttagagctagaaatagcaagttaaaataaggctagtccgttatcaacttgaaaaagtggcaccgagtcggtgcttttttt

SEQ ID NO: 7 - RNA, 6633 nt, synthetic construct
  source 1..6633: mol_type = other RNA
cctgcaggcagctgcgcgctcgctcgctcactgaggccgcccgggcaaagcccgggcgtcgggcgacctttggtcgcccggcctcagtgagcgagcgagcgcgcagagagggagtggccaactccatcactaggggttcctgcggccgcacgcgtgagggcctatttcccatgattccttcatatttgcatatacgatacaaggctgttagagagataattggaattaatttgactgtaaacacaaagatattagtacaaaatacgtgacgtagaaagtaataatttcttgggtagtttgcagttttaaaattatgttttaaaatggactatcatatgcttaccgtaacttgaaagtatttcgatttcttggctttatatatcttgtggaaaggacgaaacaccagtcaatgatcacatcctccgttttagagctagaaatagcaagttaaaataaggctagtccgttatcaacttgaaaaagtggcaccgagtcggtgctttttttctagcttaattaacattatggccttaggtcacttcatctccatggggttcttcttctgattttctagaaaatgagatgggggtgcagagagcttcctcagtgacctgcccagggtcacatcagaaatgtcagagctagaacttgaactcagattactaatcttaaattccatgccttgggggcatgcaagtacgatatacagaaggagtgaactcattagggcagatgaccaatgagtttaggaaagaagagtccagggcagggtacatctacaccacccgcccagccctgggtgagtccagccacgttcacctcattatagttgcctctctccagtcctaccttgacgggaagcacaagcagaaactgggacaggagccccaggagaccaaatcttcatggtccctctgggaggatgggtggggagagctgtggcagaggcctcaggaggggccctgctgctcagtggtgacagataggggtgagaaagcagacagagtcattccgtcagcattctgggtctgtttggtacttcttctcacgctaaggtggcggtgtgatatgcacaatggctaaaaagcagggagagctggaaagaaacaaggacagagacagaggccaagtcaaccagaccaattcccagaggaagcaaagaaaccattacagagactacaagggggaagggaaggagagatgaattagcttcccctgtaaaccttagaacccagctgttgccagggcaacggggcaatacctgtctcttcagaggagatgaagttgccagggtaactacatcctgtctttctcaaggaccatcccagaatgtggcacccactagccgttaccatagcaactgcctctttgccccacttaatcccatcccgtctgttaaaagggccctatagttggaggtgggggaggtaggaagagcgatgatcacttgtggactaagtttgttcgcatccccttctccaaccccctcagtacatcaccctgggggaacagggtccacttgctcctgggcccacacagtcctgcagtattgtgtatataaggccagggcaaagaggagcaggttttaaagtgaaaggcaggcaggtgttggggaggcagttaccggggcaacgggaacagggcgtttcggaggtggttgccatggggacctggatgctgacgaaggctcgcgaggctgtgagcagccacagtgccctgctcagaagccccaagctcgtcagtcaagccggttctccgtttgcactcaggagcacgggcaggcgagtggcccctagttctgggggcagcggtaccgccaccatgtctagactggacaagagcaaagtcataaacggcgctctggaattactcaatggagtcggtatcgaaggcctgacgacaaggaaactcgctcaaaagctgggagttgagcagcctaccctgtactggcacgtgaagaacaagcgggccctgctcgatgccctgccaatcgagatgctggacaggcatcatacccacttctgccccctggaaggcgagtcatggcaagactttctgcggaacaacgccaagtcattccgctgtgctctcctctcacatcgcgacggggctaaagtgcatctcggcacccgcccaacagagaaacagtacgaaaccctggaaaatcagctcgcgttcctgtgtcagcaaggcttctccctggagaacgcactgtacgctctgtccgccgtgggccactttacactgggctgcgtattggaggaacaggagcatcaagtagcaaaagaggaaagagagacacctaccaccgattctatgcccccacttctgagacaagcaattgagctgttcgaccggcagggagccgaacctgccttccttttcggcctggaactaatcatatgtggcctggagaaacagctaaagtgcgaaagcggcgggccggccgacgcccttgacgattttgacttagacatgctcccagccgatgcccttgacgactttgaccttgatatgctgcctgctgacgctcttgacgattttgaccttgacatgctccccgggggatccgctgagggtcggggctctctgctcacatgtggcgacgtcgaggagaatcccggaccggccccggggtcgacaatggtgtctaagggtgaggaagtaattaaggagtttatgagattcaaagttagaatggagggtagcatgaacgggcacgagtttgaaattgaaggtgagggtgaaggaagaccatatgagggcacacaaaccgccaagctcaaggttaccaaaggtggcccccttcctttcgcctgggacatcctcagccctcaattcatgtacggtagcaaggcttacgtcaaacaccctgctgatatacctgattacaaaaaactgtcatttcctgaaggatttaagtgggaacgagtaatgaattttgaggatggtgggctggtcactgtcacgcaagactcctctctgcaggacggcaccctgatttacaaggtgaagatgcgcggaacaaattttccccccgatggccccgtgatgcagaagaagaccatggggtgggaggcctctacagaacgactgtacccccgcgatggcgttcttaaaggcgaaatccatcaggcgcttaaactcaaagatggcgggcactacctggttgagttcaaaactatatatatggccaaaaagccggttcagctgcctggctactactacgtggacaccaagttggacatcacgagtcacaacgaggactacacaatcgtcgagcagtacgaacgctcagaaggtcggcatcacctgttcttgtatggcatggatgagctgtataagtaaatcgataccgagcgctgctcgagagatctacgggtggcatccctgtgacccctccccagtgcctctcctggccctggaagttgccactccagtgcccaccagccttgtcctaataaaattaagttgcatcattttgtctgactaggtgtccttctataatattatggggtggaggggggtggtatggagcaaggggcaagttgggaagacaacctgtagggcctgcggggtctattgggaaccaagctggagtgcagtggcacaatcttggctcactgcaatctccgcctcctgggttcaagcgattctcctgcctcagcctcccgagttgttgggattccaggcatgcatgaccaggctcagctaatttttgtttttttggtagagacggggtttcaccatattggccaggctggtctccaactcctaatctcaggtgatctacccaccttggcctcccaaattgctgggattacaggcgtgaaccactgctcccttccctgtccttctgattttgtaggtaaccacgtgcggaccgagcggccgcaggaacccctagtgatggagttggccactccctctctgcgcgctcgctcgctcactgaggccgggcgaccaaaggtcgcccgacgcccgggctttgcccgggcggcctcagtgagcgagcgagcgcgcagctgcctgcaggggcgcctgatgcggtattttctccttacgcatctgtgcggtatttcacaccgcatacgtcaaagcaaccatagtacgcgccctgtagcggcgcattaagcgcggcgggtgtggtggttacgcgcagcgtgaccgctacacttgccagcgccctagcgcccgctcctttcgctttcttcccttcctttctcgccacgttcgccggctttccccgtcaagctctaaatcgggggctccctttagggttccgatttagtgctttacggcacctcgaccccaaaaaacttgatttgggtgatggttcacgtagtgggccatcgccctgatagacggtttttcgccctttgacgttggagtccacgttctttaatagtggactcttgttccaaactggaacaacactcaaccctatctcgggctattcttttgatttataagggattttgccgatttcggcctattggttaaaaaatgagctgatttaacaaaaatttaacgcgaattttaacaaaatattaacgtttacaattttatggtgcactctcagtacaatctgctctgatgccgcatagttaagccagccccgacacccgccaacacccgctgacgcgccctgacgggcttgtctgctcccggcatccgcttacagacaagctgtgaccgtctccgggagctgcatgtgtcagaggttttcaccgtcatcaccgaaacgcgcgagacgaaagggcctcgtgatacgcctatttttataggttaatgtcatgataataatggtttcttagacgtcaggtggcacttttcggggaaatgtgcgcggaacccctatttgtttatttttctaaatacattcaaatatgtatccgctcatgagacaataaccctgataaatgcttcaataatattgaaaaaggaagagtatgagtattcaacatttccgtgtcgcccttattcccttttttgcggcattttgccttcctgtttttgctcacccagaaacgctggtgaaagtaaaagatgctgaagatcagttgggtgcacgagtgggttacatcgaactggatctcaacagcggtaagatccttgagagttttcgccccgaagaacgttttccaatgatgagcacttttaaagttctgctatgtggcgcggtattatcccgtattgacgccgggcaagagcaactcggtcgccgcatacactattctcagaatgacttggttgagtactcaccagtcacagaaaagcatcttacggatggcatgacagtaagagaattatgcagtgctgccataaccatgagtgataacactgcggccaacttacttctgacaacgatcggaggaccgaaggagctaaccgcttttttgcacaacatgggggatcatgtaactcgccttgatcgttgggaaccggagctgaatgaagccataccaaacgacgagcgtgacaccacgatgcctgtagcaatggcaacaacgttgcgcaaactattaactggcgaactacttactctagcttcccggcaacaattaatagactggatggaggcggataaagttgcaggaccacttctgcgctcggcccttccggctggctggtttattgctgataaatctggagccggtgagcgtgggtctcgcggtatcattgcagcactggggccagatggtaagccctcccgtatcgtagttatctacacgacggggagtcaggcaactatggatgaacgaaatagacagatcgctgagataggtgcctcactgattaagcattggtaactgtcagaccaagtttactcatatatactttagattgatttaaaacttcatttttaatttaaaaggatctaggtgaagatcctttttgataatctcatgaccaaaatcccttaacgtgagttttcgttccactgagcgtcagaccccgtagaaaagatcaaaggatcttcttgagatcctttttttctgcgcgtaatctgctgcttgcaaacaaaaaaaccaccgctaccagcggtggtttgtttgccggatcaagagctaccaactctttttccgaaggtaactggcttcagcagagcgcagataccaaatactgtccttctagtgtagccgtagttaggccaccacttcaagaactctgtagcaccgcctacatacctcgctctgctaatcctgttaccagtggctgctgccagtggcgataagtcgtgtcttaccgggttggactcaagacgatagttaccggataaggcgcagcggtcgggctgaacggggggttcgtgcacacagcccagcttggagcgaacgacctacaccgaactgagatacctacagcgtgagctatgagaaagcgccacgcttcccgaagggagaaaggcggacaggtatccggtaagcggcagggtcggaacaggagagcgcacgagggagcttccagggggaaacgcctggtatctttatagtcctgtcgggtttcgccacctctgacttgagcgtcgatttttgtgatgctcgtcaggggggcggagcctatggaaaaacgccagcaacgcggcctttttacggttcctggccttttgctggccttttgctcacatgt

SEQ ID NO: 8 - RNA, 8122 nt, synthetic construct
  source 1..8122: mol_type = other RNA
ctaaattgtaagcgttaatattttgttaaaattcgcgttaaatttttgttaaatcagctcattttttaaccaataggccgaaatcggcaaaatcccttataaatcaaaagaatagaccgagatagggttgagtgttgttccagtttggaacaagagtccactattaaagaacgtggactccaacgtcaaagggcgaaaaaccgtctatcagggcgatggcccactacgtgaaccatcaccctaatcaagttttttggggtcgaggtgccgtaaagcactaaatcggaaccctaaagggagcccccgatttagagcttgacggggaaagccggcgaacgtggcgagaaaggaagggaagaaagcgaaaggagcgggcgctagggcgctggcaagtgtagcggtcacgctgcgcgtaaccaccacacccgccgcgcttaatgcgccgctacagggcgcgtcccattcgccattcaggctgcgcaactgttgggaagggcgatcggtgcgggcctcttcgctattacgccagctggcgaaagggggatgtgctgcaaggcgattaagttgggtaacgccagggttttcccagtcacgacgttgtaaaacgacggccagtgagcgcgcgtaatacgactcactatagggcgaattgactagttattaatagtaatcaattacggggtcattagttcatagcccatatatggagttccgcgttacataacttacggtaaatggcccgcctggctgaccgcccaacgacccccgcccattgacgtcaataatgacgtatgttcccatagtaacgccaatagggactttccattgacgtcaatgggtggagtatttacggtaaactgcccacttggcagtacatcaagtgtatcatatgccaagtacgccccctattgacgtcaatgacggtaaatggcccgcctggcattatgcccagtacatgaccttatgggactttcctacttggcagtacatctacgtattagtcatcgctattaccatggtgatgcggttttggcagtacatcaatgggcgtggatagcggtttgactcacggggatttccaagtctccaccccattgacgtcaatgggagtttgttttggcaccaaaatcaacgggactttccaaaatgtcgtaacaactccgccccattgacgcaaatgggcggtaggcgtgtacggtgggaggtctatataagcagcgcgttttgcctgtactgggtctctctggttagaccagatctgagcctgggagctctctggctaactagggaacccactgcttaagcctcaataaagcttgccttgagtgcttcaagtagtgtgtgcccgtctgttgtgtgactctggtaactagagatccctcagacccttttagtcagtgtggaaaatctctagcagtggcgcccgaacagggacttgaaagcgaaagggaaaccagaggagctctctcgacgcaggactcggcttgctgaagcgcgcacggcaagaggcgaggggcggcgactggtgagtacgccaaaaattttgactagcggaggctagaaggagagagatgggtgcgagagcgtcagtattaagcgggggagaattagatcgcgatgggaaaaaattcggttaaggccagggggaaagaaaaaatataaattaaaacatatagtatgggcaagcagggagctagaacgattcgcagttaatcctggcctgttagaaacatcagaaggctgtagacaaatactgggacagctacaaccatcccttcagacaggatcagaagaacttagatcattatataatacagtagcaaccctctattgtgtgcatcaaaggatagagataaaagacaccaaggaagctttagacaagatagaggaagagcaaaacaaaagtaagaccaccgcacagcaagcggccggccgcgctgatcttcagacctggaggaggagatatgagggacaattggagaagtgaattatataaatataaagtagtaaaaattgaaccattaggagtagcacccaccaaggcaaagagaagagtggtgcagagagaaaaaagagcagtgggaataggagctttgttccttgggttcttgggagcagcaggaagcactatgggcgcagcgtcaatgacgctgacggtacaggccagacaattattgtctggtatagtgcagcagcagaacaatttgctgagggctattgaggcgcaacagcatctgttgcaactcacagtctggggcatcaagcagctccaggcaagaatcctggctgtggaaagatacctaaaggatcaacagctcctggggatttggggttgctctggaaaactcatttgcaccactgctgtgccttggaatgctagttggagtaataaatctctggaacagatttggaatcacacgacctggatggagtgggacagagaaattaacaattacacaagcttaatacactccttaattgaagaatcgcaaaaccagcaagaaaagaatgaacaagaattattggaattagataaatgggcaagtttgtggaattggtttaacataacaaattggctgtggtatataaaattattcataatgatagtaggaggcttggtaggtttaagaatagtttttgctgtactttctatagtgaatagagttaggcagggatattcaccattatcgtttcagacccacctcccaaccccgaggggacccgacaggcccgaaggaatagaagaagaaggtggagagagagacagagacagatccattcgattagtgaacggatcggcactgcgtgcgccaattctgcagacaaatggcagtattcatccacaattttaaaagaaaaggggggattggggggtacagtgcaggggaaagaatagtagacataatagcaacagacatacaaactaaagaattacaaaaacaaattacaaaaattcaaaattttcgggtttattacagggacagcagagatccagtttggttagtaccgggccctacgcgttactcgagccaaggtcgggcaggaagagggcctatttcccatgattccttcatatttgcatatacgatacaaggctgttagagagataattagaattaatttgactgtaaacacaaagatattagtacaaaatacgtgacgtagaaagtaataatttcttgggtagtttgcagttttaaaattatgttttaaaatggactatcatatgcttaccgtaacttgaaagtatttcgatttcttggctttatatatcttgtggaaaggacgaaacaccgagcgagcgcgagtccgccggttttagagctagaaatagcaagttaaaataaggctagtccgttatcaacttgaaaaagtggcaccgagtcggtgctttttttggatccaattctaccgggtaggggaggcgcttttcccaaggcagtctggagcatgcgctttagcagccccgctgggcacttggcgctacacaagtggcctctggcctcgcacacattccacatccaccggtaggcgccaaccggctccgttctttggtggccccttcgcgccaccttctactcctcccctagtcaggaagttcccccccgccccgcagctcgcgtcgtgcaggacgtgacaaatggaagtagcacgtctcactagtctcgtgcagatggacagcaccgctgagcaatggaagcgggtaggcctttggggcagcggccaatagcagctttgctccttcgctttctgggctcagaggctgggaaggggtgggtccgggggcgggctcaggggcgggctcaggggcggggcgggcgcccgaaggtcctccggaggcccggcattctgcacgcttcaaaagcgcacgtctgccgcgctgttctcctcttcctcatctccgggcctttcgacctgcatccatctagatctcgagcagctgaagcttaccatgaccgagtacaagcccacggtgcgcctcgccacccgcgacgacgtccccagggccgtacgcaccctcgccgccgcgttcgccgactaccccgccacgcgccacaccgtcgatccggaccgccacatcgagcgggtcaccgagctgcaagaactcttcctcacgcgcgtcgggctcgacatcggcaaggtgtgggtcgcggacgacggcgccgcggtggcggtctggaccacgccggagagcgtcgaagcgggggcggtgttcgccgagatcggcccgcgcatggccgagttgagcggttcccggctggccgcgcagcaacagatggaaggcctcctggcgccgcaccggcccaaggagcccgcgtggttcctggccaccgtcggcgtctcgcccgaccaccagggcaagggtctgggcagcgccgtcgtgctccccggagtggaggcggccgagcgcgccggggtgcccgccttcctggagacctccgcgccccgcaacctccccttctacgagcggctcggcttcaccgtcaccgccgacgtcgaggtgcccgaaggaccgcgcacctggtgcatgacccgcaagcccggtgccggcggcgggtccggaggagagggcagaggaagtctcctaacatgcggtgacgtggaggagaatcctggcccaatgagcgagctgattaaggagaacatgcacatgaagctgtacatggagggcaccgtggacaaccatcacttcaagtgcacatccgagggcgaaggcaagccctacgagggcacccagaccatgagaatcaaggtggtcgagggcggccctctccccttcgccttcgacatcctggctactagcttcctctacggcagcaagaccttcatcaaccacacccagggcatccccgacttcttcaagcagtccttccctgagggcttcacatgggagagagtcaccacatacgaggacgggggcgtgctgaccgctacccaggacaccagcctccaggacggctgcctcatctacaacgtcaagatcagaggggtgaacttcacatccaacggccctgtgatgcagaagaaaacactcggctgggaggccttcaccgagacgctgtaccccgctgacggcggcctggaaggcagaaacgacatggccctgaagctcgtgggcgggagccatctgatcgcaaacatcaagaccacatatagatccaagaaacccgctaagaacctcaagatgcctggcgtctactatgtggactacagactggaaagaatcaaggaggccaacaacgagacctacgtcgagcagcacgaggtggcagtggccagatactgcgacctccctagcaaactggggcacaagcttaattgagcggccgctaggtacctttaagaccaatgacttacaaggcagctgtagatcttagccactttttaaaagaaaaggggggactggaagggctaattcactcccaaagaagtcaagatctgctttttgcctgtactgggtctctctggttagaccagagtctctctggttagaccagatctgagcctgggagctctctggctaactagggaacccactgcttaagcctcaataaagcttgccttgagtgcttcaagtagtgtgtgcccgtctgttgtgtgactctggtaactagagatccctcagacccttttagtcagtgtggaaaatctctagcagtttaaacccgctgatcagcctcgactgtgccttctagttgccagccatctgttgtttgcccctcccccgtgccttccttgaccctggaaggtgccactcccactgtcctttcctaataaaatgaggaaattgcatcgcattgtctgagtaggtgtcattctattctggggggtggggtggggcaggacagcaagggggaggattgggaagtcaatagcaggcatgctggggatgcggtgggctctatgggcggccgttaattaagcttttgttccctttagtgagggttaattgcgcgcttggcgtaatcatggtcatagctgtttcctgtgtgaaattgttatccgctcacaattccacacaacatacgagccggaagcataaagtgtaaagcctggggtgcctaatgagtgagctaactcacattaattgcgttgcgctcactgcccgctttccagtcgggaaacctgtcgtgccagctgcattaatgaatcggccaacgcgcggggagaggcggtttgcgtattgggcgctcttccgcttcctcgctcactgactcgctgcgctcggtcgttcggctgcggcgagcggtatcagctcactcaaaggcggtaatacggttatccacagaatcaggggataacgcaggaaagaacatgtgagcaaaaggccagcaaaaggccaggaaccgtaaaaaggccgcgttgctggcgtttttccataggctccgcccccctgacgagcatcacaaaaatcgacgctcaagtcagaggtggcgaaacccgacaggactataaagataccaggcgtttccccctggaagctccctcgtgcgctctcctgttccgaccctgccgcttaccggatacctgtccgcctttctcccttcgggaagcgtggcgctttctcatagctcacgctgtaggtatctcagttcggtgtaggtcgttcgctccaagctgggctgtgtgcacgaaccccccgttcagcccgaccgctgcgccttatccggtaactatcgtcttgagtccaacccggtaagacacgacttatcgccactggcagcagccactggtaacaggattagcagagcgaggtatgtaggcggtgctacagagttcttgaagtggtggcctaactacggctacactagaaggacagtatttggtatctgcgctctgctgaagccagttaccttcggaaaaagagttggtagctcttgatccggcaaacaaaccaccgctggtagcggtggtttttttgtttgcaagcagcagattacgcgcagaaaaaaaggatctcaagaagatcctttgatcttttctacggggtctgacgctcagtggaacgaaaactcacgttaagggattttggtcatgagattatcaaaaaggatcttcacctagatccttttaaattaaaaatgaagttttaaatcaatctaaagtatatatgagtaaacttggtctgacagttaccaatgcttaatcagtgaggcacctatctcagcgatctgtctatttcgttcatccatagttgcctgactccccgtcgtgtagataactacgatacgggagggcttaccatctggccccagtgctgcaatgataccgcgagacccacgctcaccggctccagatttatcagcaataaaccagccagccggaagggccgagcgcagaagtggtcctgcaactttatccgcctccatccagtctattaattgttgccgggaagctagagtaagtagttcgccagttaatagtttgcgcaacgttgttgccattgctacaggcatcgtggtgtcacgctcgtcgtttggtatggcttcattcagctccggttcccaacgatcaaggcgagttacatgatcccccatgttgtgcaaaaaagcggttagctccttcggtcctccgatcgttgtcagaagtaagttggccgcagtgttatcactcatggttatggcagcactgcataattctcttactgtcatgccatccgtaagatgcttttctgtgactggtgagtactcaaccaagtcattctgagaatagtgtatgcggcgaccgagttgctcttgcccggcgtcaatacgggataataccgcgccacatagcagaactttaaaagtgctcatcattggaaaacgttcttcggggcgaaaactctcaaggatcttaccgctgttgagatccagttcgatgtaacccactcgtgcacccaactgatcttcagcatcttttactttcaccagcgtttctgggtgagcaaaaacaggaaggcaaaatgccgcaaaaaagggaataagggcgacacggaaatgttgaatactcatactcttcctttttcaatattattgaagcatttatcagggttattgtctcatgagcggatacatatttgaatgtatttagaaaaataaacaaataggggttccgcgcacatttccccgaaaagtgccac

SEQ ID NO: 9 - RNA, 8122 nt, synthetic construct
  source 1..8122: mol_type = other RNA
ctaaattgtaagcgttaatattttgttaaaattcgcgttaaatttttgttaaatcagctcattttttaaccaataggccgaaatcggcaaaatcccttataaatcaaaagaatagaccgagatagggttgagtgttgttccagtttggaacaagagtccactattaaagaacgtggactccaacgtcaaagggcgaaaaaccgtctatcagggcgatggcccactacgtgaaccatcaccctaatcaagttttttggggtcgaggtgccgtaaagcactaaatcggaaccctaaagggagcccccgatttagagcttgacggggaaagccggcgaacgtggcgagaaaggaagggaagaaagcgaaaggagcgggcgctagggcgctggcaagtgtagcggtcacgctgcgcgtaaccaccacacccgccgcgcttaatgcgccgctacagggcgcgtcccattcgccattcaggctgcgcaactgttgggaagggcgatcggtgcgggcctcttcgctattacgccagctggcgaaagggggatgtgctgcaaggcgattaagttgggtaacgccagggttttcccagtcacgacgttgtaaaacgacggccagtgagcgcgcgtaatacgactcactatagggcgaattgactagttattaatagtaatcaattacggggtcattagttcatagcccatatatggagttccgcgttacataacttacggtaaatggcccgcctggctgaccgcccaacgacccccgcccattgacgtcaataatgacgtatgttcccatagtaacgccaatagggactttccattgacgtcaatgggtggagtatttacggtaaactgcccacttggcagtacatcaagtgtatcatatgccaagtacgccccctattgacgtcaatgacggtaaatggcccgcctggcattatgcccagtacatgaccttatgggactttcctacttggcagtacatctacgtattagtcatcgctattaccatggtgatgcggttttggcagtacatcaatgggcgtggatagcggtttgactcacggggatttccaagtctccaccccattgacgtcaatgggagtttgttttggcaccaaaatcaacgggactttccaaaatgtcgtaacaactccgccccattgacgcaaatgggcggtaggcgtgtacggtgggaggtctatataagcagcgcgttttgcctgtactgggtctctctggttagaccagatctgagcctgggagctctctggctaactagggaacccactgcttaagcctcaataaagcttgccttgagtgcttcaagtagtgtgtgcccgtctgttgtgtgactctggtaactagagatccctcagacccttttagtcagtgtggaaaatctctagcagtggcgcccgaacagggacttgaaagcgaaagggaaaccagaggagctctctcgacgcaggactcggcttgctgaagcgcgcacggcaagaggcgaggggcggcgactggtgagtacgccaaaaattttgactagcggaggctagaaggagagagatgggtgcgagagcgtcagtattaagcgggggagaattagatcgcgatgggaaaaaattcggttaaggccagggggaaagaaaaaatataaattaaaacatatagtatgggcaagcagggagctagaacgattcgcagttaatcctggcctgttagaaacatcagaaggctgtagacaaatactgggacagctacaaccatcccttcagacaggatcagaagaacttagatcattatataatacagtagcaaccctctattgtgtgcatcaaaggatagagataaaagacaccaaggaagctttagacaagatagaggaagagcaaaacaaaagtaagaccaccgcacagcaagcggccggccgcgctgatcttcagacctggaggaggagatatgagggacaattggagaagtgaattatataaatataaagtagtaaaaattgaaccattaggagtagcacccaccaaggcaaagagaagagtggtgcagagagaaaaaagagcagtgggaataggagctttgttccttgggttcttgggagcagcaggaagcactatgggcgcagcgtcaatgacgctgacggtacaggccagacaattattgtctggtatagtgcagcagcagaacaatttgctgagggctattgaggcgcaacagcatctgttgcaactcacagtctggggcatcaagcagctccaggcaagaatcctggctgtggaaagatacctaaaggatcaacagctcctggggatttggggttgctctggaaaactcatttgcaccactgctgtgccttggaatgctagttggagtaataaatctctggaacagatttggaatcacacgacctggatggagtgggacagagaaattaacaattacacaagcttaatacactccttaattgaagaatcgcaaaaccagcaagaaaagaatgaacaagaattattggaattagataaatgggcaagtttgtggaattggtttaacataacaaattggctgtggtatataaaattattcataatgatagtaggaggcttggtaggtttaagaatagtttttgctgtactttctatagtgaatagagttaggcagggatattcaccattatcgtttcagacccacctcccaaccccgaggggacccgacaggcccgaaggaatagaagaagaaggtggagagagagacagagacagatccattcgattagtgaacggatcggcactgcgtgcgccaattctgcagacaaatggcagtattcatccacaattttaaaagaaaaggggggattggggggtacagtgcaggggaaagaatagtagacataatagcaacagacatacaaactaaagaattacaaaaacaaattacaaaaattcaaaattttcgggtttattacagggacagcagagatccagtttggttagtaccgggccctacgcgttactcgagccaaggtcgggcaggaagagggcctatttcccatgattccttcatatttgcatatacgatacaaggctgttagagagataattagaattaatttgactgtaaacacaaagatattagtacaaaatacgtgacgtagaaagtaataatttcttgggtagtttgcagttttaaaattatgttttaaaatggactatcatatgcttaccgtaacttgaaagtatttcgatttcttggctttatatatcttgtggaaaggacgaaacaccggtgactagcgattattccagttttagagctagaaatagcaagttaaaataaggctagtccgttatcaacttgaaaaagtggcaccgagtcggtgctttttttggatccaattctaccgggtaggggaggcgcttttcccaaggcagtctggagcatgcgctttagcagccccgctgggcacttggcgctacacaagtggcctctggcctcgcacacattccacatccaccggtaggcgccaaccggctccgttctttggtggccccttcgcgccaccttctactcctcccctagtcaggaagttcccccccgccccgcagctcgcgtcgtgcaggacgtgacaaatggaagtagcacgtctcactagtctcgtgcagatggacagcaccgctgagcaatggaagcgggtaggcctttggggcagcggccaatagcagctttgctccttcgctttctgggctcagaggctgggaaggggtgggtccgggggcgggctcaggggcgggctcaggggcggggcgggcgcccgaaggtcctccggaggcccggcattctgcacgcttcaaaagcgcacgtctgccgcgctgttctcctcttcctcatctccgggcctttcgacctgcatccatctagatctcgagcagctgaagcttaccatgaccgagtacaagcccacggtgcgcctcgccacccgcgacgacgtccccagggccgtacgcaccctcgccgccgcgttcgccgactaccccgccacgcgccacaccgtcgatccggaccgccacatcgagcgggtcaccgagctgcaagaactcttcctcacgcgcgtcgggctcgacatcggcaaggtgtgggtcgcggacgacggcgccgcggtggcggtctggaccacgccggagagcgtcgaagcgggggcggtgttcgccgagatcggcccgcgcatggccgagttgagcggttcccggctggccgcgcagcaacagatggaaggcctcctggcgccgcaccggcccaaggagcccgcgtggttcctggccaccgtcggcgtctcgcccgaccaccagggcaagggtctgggcagcgccgtcgtgctccccggagtggaggcggccgagcgcgccggggtgcccgccttcctggagacctccgcgccccgcaacctccccttctacgagcggctcggcttcaccgtcaccgccgacgtcgaggtgcccgaaggaccgcgcacctggtgcatgacccgcaagcccggtgccggcggcgggtccggaggagagggcagaggaagtctcctaacatgcggtgacgtggaggagaatcctggcccaatgagcgagctgattaaggagaacatgcacatgaagctgtacatggagggcaccgtggacaaccatcacttcaagtgcacatccgagggcgaaggcaagccctacgagggcacccagaccatgagaatcaaggtggtcgagggcggccctctccccttcgccttcgacatcctggctactagcttcctctacggcagcaagaccttcatcaaccacacccagggcatccccgacttcttcaagcagtccttccctgagggcttcacatgggagagagtcaccacatacgaggacgggggcgtgctgaccgctacccaggacaccagcctccaggacggctgcctcatctacaacgtcaagatcagaggggtgaacttcacatccaacggccctgtgatgcagaagaaaacactcggctgggaggccttcaccgagacgctgtaccccgctgacggcggcctggaaggcagaaacgacatggccctgaagctcgtgggcgggagccatctgatcgcaaacatcaagaccacatatagatccaagaaacccgctaagaacctcaagatgcctggcgtctactatgtggactacagactggaaagaatcaaggaggccaacaacgagacctacgtcgagcagcacgaggtggcagtggccagatactgcgacctccctagcaaactggggcacaagcttaattgagcggccgctaggtacctttaagaccaatgacttacaaggcagctgtagatcttagccactttttaaaagaaaaggggggactggaagggctaattcactcccaaagaagtcaagatctgctttttgcctgtactgggtctctctggttagaccagagtctctctggttagaccagatctgagcctgggagctctctggctaactagggaacccactgcttaagcctcaataaagcttgccttgagtgcttcaagtagtgtgtgcccgtctgttgtgtgactctggtaactagagatccctcagacccttttagtcagtgtggaaaatctctagcagtttaaacccgctgatcagcctcgactgtgccttctagttgccagccatctgttgtttgcccctcccccgtgccttccttgaccctggaaggtgccactcccactgtcctttcctaataaaatgaggaaattgcatcgcattgtctgagtaggtgtcattctattctggggggtggggtggggcaggacagcaagggggaggattgggaagtcaatagcaggcatgctggggatgcggtgggctctatgggcggccgttaattaagcttttgttccctttagtgagggttaattgcgcgcttggcgtaatcatggtcatagctgtttcctgtgtgaaattgttatccgctcacaattccacacaacatacgagccggaagcataaagtgtaaagcctggggtgcctaatgagtgagctaactcacattaattgcgttgcgctcactgcccgctttccagtcgggaaacctgtcgtgccagctgcattaatgaatcggccaacgcgcggggagaggcggtttgcgtattgggcgctcttccgcttcctcgctcactgactcgctgcgctcggtcgttcggctgcggcgagcggtatcagctcactcaaaggcggtaatacggttatccacagaatcaggggataacgcaggaaagaacatgtgagcaaaaggccagcaaaaggccaggaaccgtaaaaaggccgcgttgctggcgtttttccataggctccgcccccctgacgagcatcacaaaaatcgacgctcaagtcagaggtggcgaaacccgacaggactataaagataccaggcgtttccccctggaagctccctcgtgcgctctcctgttccgaccctgccgcttaccggatacctgtccgcctttctcccttcgggaagcgtggcgctttctcatagctcacgctgtaggtatctcagttcggtgtaggtcgttcgctccaagctgggctgtgtgcacgaaccccccgttcagcccgaccgctgcgccttatccggtaactatcgtcttgagtccaacccggtaagacacgacttatcgccactggcagcagccactggtaacaggattagcagagcgaggtatgtaggcggtgctacagagttcttgaagtggtggcctaactacggctacactagaaggacagtatttggtatctgcgctctgctgaagccagttaccttcggaaaaagagttggtagctcttgatccggcaaacaaaccaccgctggtagcggtggtttttttgtttgcaagcagcagattacgcgcagaaaaaaaggatctcaagaagatcctttgatcttttctacggggtctgacgctcagtggaacgaaaactcacgttaagggattttggtcatgagattatcaaaaaggatcttcacctagatccttttaaattaaaaatgaagttttaaatcaatctaaagtatatatgagtaaacttggtctgacagttaccaatgcttaatcagtgaggcacctatctcagcgatctgtctatttcgttcatccatagttgcctgactccccgtcgtgtagataactacgatacgggagggcttaccatctggccccagtgctgcaatgataccgcgagacccacgctcaccggctccagatttatcagcaataaaccagccagccggaagggccgagcgcagaagtggtcctgcaactttatccgcctccatccagtctattaattgttgccgggaagctagagtaagtagttcgccagttaatagtttgcgcaacgttgttgccattgctacaggcatcgtggtgtcacgctcgtcgtttggtatggcttcattcagctccggttcccaacgatcaaggcgagttacatgatcccccatgttgtgcaaaaaagcggttagctccttcggtcctccgatcgttgtcagaagtaagttggccgcagtgttatcactcatggttatggcagcactgcataattctcttactgtcatgccatccgtaagatgcttttctgtgactggtgagtactcaaccaagtcattctgagaatagtgtatgcggcgaccgagttgctcttgcccggcgtcaatacgggataataccgcgccacatagcagaactttaaaagtgctcatcattggaaaacgttcttcggggcgaaaactctcaaggatcttaccgctgttgagatccagttcgatgtaacccactcgtgcacccaactgatcttcagcatcttttactttcaccagcgtttctgggtgagcaaaaacaggaaggcaaaatgccgcaaaaaagggaataagggcgacacggaaatgttgaatactcatactcttcctttttcaatattattgaagcatttatcagggttattgtctcatgagcggatacatatttgaatgtatttagaaaaataaacaaataggggttccgcgcacatttccccgaaaagtgccac

SEQ ID NO: 10 - RNA, 8123 nt, synthetic construct
  source 1..8123: mol_type = other RNA
ctaaattgtaagcgttaatattttgttaaaattcgcgttaaatttttgttaaatcagctcattttttaaccaataggccgaaatcggcaaaatcccttataaatcaaaagaatagaccgagatagggttgagtgttgttccagtttggaacaagagtccactattaaagaacgtggactccaacgtcaaagggcgaaaaaccgtctatcagggcgatggcccactacgtgaaccatcaccctaatcaagttttttggggtcgaggtgccgtaaagcactaaatcggaaccctaaagggagcccccgatttagagcttgacggggaaagccggcgaacgtggcgagaaaggaagggaagaaagcgaaaggagcgggcgctagggcgctggcaagtgtagcggtcacgctgcgcgtaaccaccacacccgccgcgcttaatgcgccgctacagggcgcgtcccattcgccattcaggctgcgcaactgttgggaagggcgatcggtgcgggcctcttcgctattacgccagctggcgaaagggggatgtgctgcaaggcgattaagttgggtaacgccagggttttcccagtcacgacgttgtaaaacgacggccagtgagcgcgcgtaatacgactcactatagggcgaattgactagttattaatagtaatcaattacggggtcattagttcatagcccatatatggagttccgcgttacataacttacggtaaatggcccgcctggctgaccgcccaacgacccccgcccattgacgtcaataatgacgtatgttcccatagtaacgccaatagggactttccattgacgtcaatgggtggagtatttacggtaaactgcccacttggcagtacatcaagtgtatcatatgccaagtacgccccctattgacgtcaatgacggtaaatggcccgcctggcattatgcccagtacatgaccttatgggactttcctacttggcagtacatctacgtattagtcatcgctattaccatggtgatgcggttttggcagtacatcaatgggcgtggatagcggtttgactcacggggatttccaagtctccaccccattgacgtcaatgggagtttgttttggcaccaaaatcaacgggactttccaaaatgtcgtaacaactccgccccattgacgcaaatgggcggtaggcgtgtacggtgggaggtctatataagcagcgcgttttgcctgtactgggtctctctggttagaccagatctgagcctgggagctctctggctaactagggaacccactgcttaagcctcaataaagcttgccttgagtgcttcaagtagtgtgtgcccgtctgttgtgtgactctggtaactagagatccctcagacccttttagtcagtgtggaaaatctctagcagtggcgcccgaacagggacttgaaagcgaaagggaaaccagaggagctctctcgacgcaggactcggcttgctgaagcgcgcacggcaagaggcgaggggcggcgactggtgagtacgccaaaaattttgactagcggaggctagaaggagagagatgggtgcgagagcgtcagtattaagcgggggagaattagatcgcgatgggaaaaaattcggttaaggccagggggaaagaaaaaatataaattaaaacatatagtatgggcaagcagggagctagaacgattcgcagttaatcctggcctgttagaaacatcagaaggctgtagacaaatactgggacagctacaaccatcccttcagacaggatcagaagaacttagatcattatataatacagtagcaaccctctattgtgtgcatcaaaggatagagataaaagacaccaaggaagctttagacaagatagaggaagagcaaaacaaaagtaagaccaccgcacagcaagcggccggccgcgctgatcttcagacctggaggaggagatatgagggacaattggagaagtgaattatataaatataaagtagtaaaaattgaaccattaggagtagcacccaccaaggcaaagagaagagtggtgcagagagaaaaaagagcagtgggaataggagctttgttccttgggttcttgggagcagcaggaagcactatgggcgcagcgtcaatgacgctgacggtacaggccagacaattattgtctggtatagtgcagcagcagaacaatttgctgagggctattgaggcgcaacagcatctgttgcaactcacagtctggggcatcaagcagctccaggcaagaatcctggctgtggaaagatacctaaaggatcaacagctcctggggatttggggttgctctggaaaactcatttgcaccactgctgtgccttggaatgctagttggagtaataaatctctggaacagatttggaatcacacgacctggatggagtgggacagagaaattaacaattacacaagcttaatacactccttaattgaagaatcgcaaaaccagcaagaaaagaatgaacaagaattattggaattagataaatgggcaagtttgtggaattggtttaacataacaaattggctgtggtatataaaattattcataatgatagtaggaggcttggtaggtttaagaatagtttttgctgtactttctatagtgaatagagttaggcagggatattcaccattatcgtttcagacccacctcccaaccccgaggggacccgacaggcccgaaggaatagaagaagaaggtggagagagagacagagacagatccattcgattagtgaacggatcggcactgcgtgcgccaattctgcagacaaatggcagtattcatccacaattttaaaagaaaaggggggattggggggtacagtgcaggggaaagaatagtagacataatagcaacagacatacaaactaaagaattacaaaaacaaattacaaaaattcaaaattttcgggtttattacagggacagcagagatccagtttggttagtaccgggccctacgcgttactcgagccaaggtcgggcaggaagagggcctatttcccatgattccttcatatttgcatatacgatacaaggctgttagagagataattagaattaatttgactgtaaacacaaagatattagtacaaaatacgtgacgtagaaagtaataatttcttgggtagtttgcagttttaaaattatgttttaaaatggactatcatatgcttaccgtaacttgaaagtatttcgatttcttggctttatatatcttgtggaaaggacgaaacaccgaacatggtctttcccgaagcgttttagagctagaaatagcaagttaaaataaggctagtccgttatcaacttgaaaaagtggcaccgagtcggtgctttttttggatccaattctaccgggtaggggaggcgcttttcccaaggcagtctggagcatgcgctttagcagccccgctgggcacttggcgctacacaagtggcctctggcctcgcacacattccacatccaccggtaggcgccaaccggctccgttctttggtggccccttcgcgccaccttctactcctcccctagtcaggaagttcccccccgccccgcagctcgcgtcgtgcaggacgtgacaaatggaagtagcacgtctcactagtctcgtgcagatggacagcaccgctgagcaatggaagcgggtaggcctttggggcagcggccaatagcagctttgctccttcgctttctgggctcagaggctgggaaggggtgggtccgggggcgggctcaggggcgggctcaggggcggggcgggcgcccgaaggtcctccggaggcccggcattctgcacgcttcaaaagcgcacgtctgccgcgctgttctcctcttcctcatctccgggcctttcgacctgcatccatctagatctcgagcagctgaagcttaccatgaccgagtacaagcccacggtgcgcctcgccacccgcgacgacgtccccagggccgtacgcaccctcgccgccgcgttcgccgactaccccgccacgcgccacaccgtcgatccggaccgccacatcgagcgggtcaccgagctgcaagaactcttcctcacgcgcgtcgggctcgacatcggcaaggtgtgggtcgcggacgacggcgccgcggtggcggtctggaccacgccggagagcgtcgaagcgggggcggtgttcgccgagatcggcccgcgcatggccgagttgagcggttcccggctggccgcgcagcaacagatggaaggcctcctggcgccgcaccggcccaaggagcccgcgtggttcctggccaccgtcggcgtctcgcccgaccaccagggcaagggtctgggcagcgccgtcgtgctccccggagtggaggcggccgagcgcgccggggtgcccgccttcctggagacctccgcgccccgcaacctccccttctacgagcggctcggcttcaccgtcaccgccgacgtcgaggtgcccgaaggaccgcgcacctggtgcatgacccgcaagcccggtgccggcggcgggtccggaggagagggcagaggaagtctcctaacatgcggtgacgtggaggagaatcctggcccaatgagcgagctgattaaggagaacatgcacatgaagctgtacatggagggcaccgtggacaaccatcacttcaagtgcacatccgagggcgaaggcaagccctacgagggcacccagaccatgagaatcaaggtggtcgagggcggccctctccccttcgccttcgacatcctggctactagcttcctctacggcagcaagaccttcatcaaccacacccagggcatccccgacttcttcaagcagtccttccctgagggcttcacatgggagagagtcaccacatacgaggacgggggcgtgctgaccgctacccaggacaccagcctccaggacggctgcctcatctacaacgtcaagatcagaggggtgaacttcacatccaacggccctgtgatgcagaagaaaacactcggctgggaggccttcaccgagacgctgtaccccgctgacggcggcctggaaggcagaaacgacatggccctgaagctcgtgggcgggagccatctgatcgcaaacatcaagaccacatatagatccaagaaacccgctaagaacctcaagatgcctggcgtctactatgtggactacagactggaaagaatcaaggaggccaacaacgagacctacgtcgagcagcacgaggtggcagtggccagatactgcgacctccctagcaaactggggcacaagcttaattgagcggccgctaggtacctttaagaccaatgacttacaaggcagctgtagatcttagccactttttaaaagaaaaggggggactggaagggctaattcactcccaaagaagtcaagatctgctttttgcctgtactgggtctctctggttagaccagagtctctctggttagaccagatctgagcctgggagctctctggctaactagggaacccactgcttaagcctcaataaagcttgccttgagtgcttcaagtagtgtgtgcccgtctgttgtgtgactctggtaactagagatccctcagacccttttagtcagtgtggaaaatctctagcagtttaaacccgctgatcagcctcgactgtgccttctagttgccagccatctgttgtttgcccctcccccgtgccttccttgaccctggaaggtgccactcccactgtcctttcctaataaaatgaggaaattgcatcgcattgtctgagtaggtgtcattctattctggggggtggggtggggcaggacagcaagggggaggattgggaagtcaatagcaggcatgctggggatgcggtgggctctatgggcggccgttaattaagcttttgttccctttagtgagggttaattgcgcgcttggcgtaatcatggtcatagctgtttcctgtgtgaaattgttatccgctcacaattccacacaacatacgagccggaagcataaagtgtaaagcctggggtgcctaatgagtgagctaactcacattaattgcgttgcgctcactgcccgctttccagtcgggaaacctgtcgtgccagctgcattaatgaatcggccaacgcgcggggagaggcggtttgcgtattgggcgctcttccgcttcctcgctcactgactcgctgcgctcggtcgttcggctgcggcgagcggtatcagctcactcaaaggcggtaatacggttatccacagaatcaggggataacgcaggaaagaacatgtgagcaaaaggccagcaaaaggccaggaaccgtaaaaaggccgcgttgctggcgtttttccataggctccgcccccctgacgagcatcacaaaaatcgacgctcaagtcagaggtggcgaaacccgacaggactataaagataccaggcgtttccccctggaagctccctcgtgcgctctcctgttccgaccctgccgcttaccggatacctgtccgcctttctcccttcgggaagcgtggcgctttctcatagctcacgctgtaggtatctcagttcggtgtaggtcgttcgctccaagctgggctgtgtgcacgaaccccccgttcagcccgaccgctgcgccttatccggtaactatcgtcttgagtccaacccggtaagacacgacttatcgccactggcagcagccactggtaacaggattagcagagcgaggtatgtaggcggtgctacagagttcttgaagtggtggcctaactacggctacactagaaggacagtatttggtatctgcgctctgctgaagccagttaccttcggaaaaagagttggtagctcttgatccggcaaacaaaccaccgctggtagcggtggtttttttgtttgcaagcagcagattacgcgcagaaaaaaaggatctcaagaagatcctttgatcttttctacggggtctgacgctcagtggaacgaaaactcacgttaagggattttggtcatgagattatcaaaaaggatcttcacctagatccttttaaattaaaaatgaagttttaaatcaatctaaagtatatatgagtaaacttggtctgacagttaccaatgcttaatcagtgaggcacctatctcagcgatctgtctatttcgttcatccatagttgcctgactccccgtcgtgtagataactacgatacgggagggcttaccatctggccccagtgctgcaatgataccgcgagacccacgctcaccggctccagatttatcagcaataaaccagccagccggaagggccgagcgcagaagtggtcctgcaactttatccgcctccatccagtctattaattgttgccgggaagctagagtaagtagttcgccagttaatagtttgcgcaacgttgttgccattgctacaggcatcgtggtgtcacgctcgtcgtttggtatggcttcattcagctccggttcccaacgatcaaggcgagttacatgatcccccatgttgtgcaaaaaagcggttagctccttcggtcctccgatcgttgtcagaagtaagttggccgcagtgttatcactcatggttatggcagcactgcataattctcttactgtcatgccatccgtaagatgcttttctgtgactggtgagtactcaaccaagtcattctgagaatagtgtatgcggcgaccgagttgctcttgcccggcgtcaatacgggataataccgcgccacatagcagaactttaaaagtgctcatcattggaaaacgttcttcggggcgaaaactctcaaggatcttaccgctgttgagatccagttcgatgtaacccactcgtgcacccaactgatcttcagcatcttttactttcaccagcgtttctgggtgagcaaaaacaggaaggcaaaatgccgcaaaaaagggaataagggcgacacggaaatgttgaatactcatactcttcctttttcaatattattgaagcatttatcagggttattgtctcatgagcggatacatatttgaatgtatttagaaaaataaacaaataggggttccgcgcacatttccccgaaaagtgccac

SEQ ID NO: 11 - RNA, 8123 nt, synthetic construct
  source 1..8123: mol_type = other RNA
ctaaattgtaagcgttaatattttgttaaaattcgcgttaaatttttgttaaatcagctcattttttaaccaataggccgaaatcggcaaaatcccttataaatcaaaagaatagaccgagatagggttgagtgttgttccagtttggaacaagagtccactattaaagaacgtggactccaacgtcaaagggcgaaaaaccgtctatcagggcgatggcccactacgtgaaccatcaccctaatcaagttttttggggtcgaggtgccgtaaagcactaaatcggaaccctaaagggagcccccgatttagagcttgacggggaaagccggcgaacgtggcgagaaaggaagggaagaaagcgaaaggagcgggcgctagggcgctggcaagtgtagcggtcacgctgcgcgtaaccaccacacccgccgcgcttaatgcgccgctacagggcgcgtcccattcgccattcaggctgcgcaactgttgggaagggcgatcggtgcgggcctcttcgctattacgccagctggcgaaagggggatgtgctgcaaggcgattaagttgggtaacgccagggttttcccagtcacgacgttgtaaaacgacggccagtgagcgcgcgtaatacgactcactatagggcgaattgactagttattaatagtaatcaattacggggtcattagttcatagcccatatatggagttccgcgttacataacttacggtaaatggcccgcctggctgaccgcccaacgacccccgcccattgacgtcaataatgacgtatgttcccatagtaacgccaatagggactttccattgacgtcaatgggtggagtatttacggtaaactgcccacttggcagtacatcaagtgtatcatatgccaagtacgccccctattgacgtcaatgacggtaaatggcccgcctggcattatgcccagtacatgaccttatgggactttcctacttggcagtacatctacgtattagtcatcgctattaccatggtgatgcggttttggcagtacatcaatgggcgtggatagcggtttgactcacggggatttccaagtctccaccccattgacgtcaatgggagtttgttttggcaccaaaatcaacgggactttccaaaatgtcgtaacaactccgccccattgacgcaaatgggcggtaggcgtgtacggtgggaggtctatataagcagcgcgttttgcctgtactgggtctctctggttagaccagatctgagcctgggagctctctggctaactagggaacccactgcttaagcctcaataaagcttgccttgagtgcttcaagtagtgtgtgcccgtctgttgtgtgactctggtaactagagatccctcagacccttttagtcagtgtggaaaatctctagcagtggcgcccgaacagggacttgaaagcgaaagggaaaccagaggagctctctcgacgcaggactcggcttgctgaagcgcgcacggcaagaggcgaggggcggcgactggtgagtacgccaaaaattttgactagcggaggctagaaggagagagatgggtgcgagagcgtcagtattaagcgggggagaattagatcgcgatgggaaaaaattcggttaaggccagggggaaagaaaaaatataaattaaaacatatagtatgggcaagcagggagctagaacgattcgcagttaatcctggcctgttagaaacatcagaaggctgtagacaaatactgggacagctacaaccatcccttcagacaggatcagaagaacttagatcattatataatacagtagcaaccctctattgtgtgcatcaaaggatagagataaaagacaccaaggaagctttagacaagatagaggaagagcaaaacaaaagtaagaccaccgcacagcaagcggccggccgcgctgatcttcagacctggaggaggagatatgagggacaattggagaagtgaattatataaatataaagtagtaaaaattgaaccattaggagtagcacccaccaaggcaaagagaagagtggtgcagagagaaaaaagagcagtgggaataggagctttgttccttgggttcttgggagcagcaggaagcactatgggcgcagcgtcaatgacgctgacggtacaggccagacaattattgtctggtatagtgcagcagcagaacaatttgctgagggctattgaggcgcaacagcatctgttgcaactcacagtctggggcatcaagcagctccaggcaagaatcctggctgtggaaagatacctaaaggatcaacagctcctggggatttggggttgctctggaaaactcatttgcaccactgctgtgccttggaatgctagttggagtaataaatctctggaacagatttggaatcacacgacctggatggagtgggacagagaaattaacaattacacaagcttaatacactccttaattgaagaatcgcaaaaccagcaagaaaagaatgaacaagaattattggaattagataaatgggcaagtttgtggaattggtttaacataacaaattggctgtggtatataaaattattcataatgatagtaggaggcttggtaggtttaagaatagtttttgctgtactttctatagtgaatagagttaggcagggatattcaccattatcgtttcagacccacctcccaaccccgaggggacccgacaggcccgaaggaatagaagaagaaggtggagagagagacagagacagatccattcgattagtgaacggatcggcactgcgtgcgccaattctgcagacaaatggcagtattcatccacaattttaaaagaaaaggggggattggggggtacagtgcaggggaaagaatagtagacataatagcaacagacatacaaactaaagaattacaaaaacaaattacaaaaattcaaaattttcgggtttattacagggacagcagagatccagtttggttagtaccgggccctacgcgttactcgagccaaggtcgggcaggaagagggcctatttcccatgattccttcatatttgcatatacgatacaaggctgttagagagataattagaattaatttgactgtaaacacaaagatattagtacaaaatacgtgacgtagaaagtaataatttcttgggtagtttgcagttttaaaattatgttttaaaatggactatcatatgcttaccgtaacttgaaagtatttcgatttcttggctttatatatcttgtggaaaggacgaaacaccgtgcgaatacgcccacgcgatgttttagagctagaaatagcaagttaaaataaggctagtccgttatcaacttgaaaaagtggcaccgagtcggtgctttttttggatccaattctaccgggtaggggaggcgcttttcccaaggcagtctggagcatgcgctttagcagccccgctgggcacttggcgctacacaagtggcctctggcctcgcacacattccacatccaccggtaggcgccaaccggctccgttctttggtggccccttcgcgccaccttctactcctcccctagtcaggaagttcccccccgccccgcagctcgcgtcgtgcaggacgtgacaaatggaagtagcacgtctcactagtctcgtgcagatggacagcaccgctgagcaatggaagcgggtaggcctttggggcagcggccaatagcagctttgctccttcgctttctgggctcagaggctgggaaggggtgggtccgggggcgggctcaggggcgggctcaggggcggggcgggcgcccgaaggtcctccggaggcccggcattctgcacgcttcaaaagcgcacgtctgccgcgctgttctcctcttcctcatctccgggcctttcgacctgcatccatctagatctcgagcagctgaagcttaccatgaccgagtacaagcccacggtgcgcctcgccacccgcgacgacgtccccagggccgtacgcaccctcgccgccgcgttcgccgactaccccgccacgcgccacaccgtcgatccggaccgccacatcgagcgggtcaccgagctgcaagaactcttcctcacgcgcgtcgggctcgacatcggcaaggtgtgggtcgcggacgacggcgccgcggtggcggtctggaccacgccggagagcgtcgaagcgggggcggtgttcgccgagatcggcccgcgcatggccgagttgagcggttcccggctggccgcgcagcaacagatggaaggcctcctggcgccgcaccggcccaaggagcccgcgtggttcctggccaccgtcggcgtctcgcccgaccaccagggcaagggtctgggcagcgccgtcgtgctccccggagtggaggcggccgagcgcgccggggtgcccgccttcctggagacctccgcgccccgcaacctccccttctacgagcggctcggcttcaccgtcaccgccgacgtcgaggtgcccgaaggaccgcgcacctggtgcatgacccgcaagcccggtgccggcggcgggtccggaggagagggcagaggaagtctcctaacatgcggtgacgtggaggagaatcctggcccaatgagcgagctgattaaggagaacatgcacatgaagctgtacatggagggcaccgtggacaaccatcacttcaagtgcacatccgagggcgaaggcaagccctacgagggcacccagaccatgagaatcaaggtggtcgagggcggccctctccccttcgccttcgacatcctggctactagcttcctctacggcagcaagaccttcatcaaccacacccagggcatccccgacttcttcaagcagtccttccctgagggcttcacatgggagagagtcaccacatacgaggacgggggcgtgctgaccgctacccaggacaccagcctccaggacggctgcctcatctacaacgtcaagatcagaggggtgaacttcacatccaacggccctgtgatgcagaagaaaacactcggctgggaggccttcaccgagacgctgtaccccgctgacggcggcctggaaggcagaaacgacatggccctgaagctcgtgggcgggagccatctgatcgcaaacatcaagaccacatatagatccaagaaacccgctaagaacctcaagatgcctggcgtctactatgtggactacagactggaaagaatcaaggaggccaacaacgagacctacgtcgagcagcacgaggtggcagtggccagatactgcgacctccctagcaaactggggcacaagcttaattgagcggccgctaggtacctttaagaccaatgacttacaaggcagctgtagatcttagccactttttaaaagaaaaggggggactggaagggctaattcactcccaaagaagtcaagatctgctttttgcctgtactgggtctctctggttagaccagagtctctctggttagaccagatctgagcctgggagctctctggctaactagggaacccactgcttaagcctcaataaagcttgccttgagtgcttcaagtagtgtgtgcccgtctgttgtgtgactctggtaactagagatccctcagacccttttagtcagtgtggaaaatctctagcagtttaaacccgctgatcagcctcgactgtgccttctagttgccagccatctgttgtttgcccctcccccgtgccttccttgaccctggaaggtgccactcccactgtcctttcctaataaaatgaggaaattgcatcgcattgtctgagtaggtgtcattctattctggggggtggggtggggcaggacagcaagggggaggattgggaagtcaatagcaggcatgctggggatgcggtgggctctatgggcggccgttaattaagcttttgttccctttagtgagggttaattgcgcgcttggcgtaatcatggtcatagctgtttcctgtgtgaaattgttatccgctcacaattccacacaacatacgagccggaagcataaagtgtaaagcctggggtgcctaatgagtgagctaactcacattaattgcgttgcgctcactgcccgctttccagtcgggaaacctgtcgtgccagctgcattaatgaatcggccaacgcgcggggagaggcggtttgcgtattgggcgctcttccgcttcctcgctcactgactcgctgcgctcggtcgttcggctgcggcgagcggtatcagctcactcaaaggcggtaatacggttatccacagaatcaggggataacgcaggaaagaacatgtgagcaaaaggccagcaaaaggccaggaaccgtaaaaaggccgcgttgctggcgtttttccataggctccgcccccctgacgagcatcacaaaaatcgacgctcaagtcagaggtggcgaaacccgacaggactataaagataccaggcgtttccccctggaagctccctcgtgcgctctcctgttccgaccctgccgcttaccggatacctgtccgcctttctcccttcgggaagcgtggcgctttctcatagctcacgctgtaggtatctcagttcggtgtaggtcgttcgctccaagctgggctgtgtgcacgaaccccccgttcagcccgaccgctgcgccttatccggtaactatcgtcttgagtccaacccggtaagacacgacttatcgccactggcagcagccactggtaacaggattagcagagcgaggtatgtaggcggtgctacagagttcttgaagtggtggcctaactacggctacactagaaggacagtatttggtatctgcgctctgctgaagccagttaccttcggaaaaagagttggtagctcttgatccggcaaacaaaccaccgctggtagcggtggtttttttgtttgcaagcagcagattacgcgcagaaaaaaaggatctcaagaagatcctttgatcttttctacggggtctgacgctcagtggaacgaaaactcacgttaagggattttggtcatgagattatcaaaaaggatcttcacctagatccttttaaattaaaaatgaagttttaaatcaatctaaagtatatatgagtaaacttggtctgacagttaccaatgcttaatcagtgaggcacctatctcagcgatctgtctatttcgttcatccatagttgcctgactccccgtcgtgtagataactacgatacgggagggcttaccatctggccccagtgctgcaatgataccgcgagacccacgctcaccggctccagatttatcagcaataaaccagccagccggaagggccgagcgcagaagtggtcctgcaactttatccgcctccatccagtctattaattgttgccgggaagctagagtaagtagttcgccagttaatagtttgcgcaacgttgttgccattgctacaggcatcgtggtgtcacgctcgtcgtttggtatggcttcattcagctccggttcccaacgatcaaggcgagttacatgatcccccatgttgtgcaaaaaagcggttagctccttcggtcctccgatcgttgtcagaagtaagttggccgcagtgttatcactcatggttatggcagcactgcataattctcttactgtcatgccatccgtaagatgcttttctgtgactggtgagtactcaaccaagtcattctgagaatagtgtatgcggcgaccgagttgctcttgcccggcgtcaatacgggataataccgcgccacatagcagaactttaaaagtgctcatcattggaaaacgttcttcggggcgaaaactctcaaggatcttaccgctgttgagatccagttcgatgtaacccactcgtgcacccaactgatcttcagcatcttttactttcaccagcgtttctgggtgagcaaaaacaggaaggcaaaatgccgcaaaaaagggaataagggcgacacggaaatgttgaatactcatactcttcctttttcaatattattgaagcatttatcagggttattgtctcatgagcggatacatatttgaatgtatttagaaaaataaacaaataggggttccgcgcacatttccccgaaaagtgccac

SEQ ID NO: 12 - DNA, 14084 bp, synthetic construct
  source 1..14084: mol_type = other DNA
gtcgacggatcgggagatctcccgatcccctatggtgcactctcagtacaatctgctctgatgccgcatagttaagccagtatctgctccctgcttgtgtgttggaggtcgctgagtagtgcgcgagcaaaatttaagctacaacaaggcaaggcttgaccgacaattgcatgaagaatctgcttagggttaggcgttttgcgctgcttcgcgatgtacgggccagatatacgcgttgacattgattattgactagttattaatagtaatcaattacggggtcattagttcatagcccatatatggagttccgcgttacataacttacggtaaatggcccgcctggctgaccgcccaacgacccccgcccattgacgtcaataatgacgtatgttcccatagtaacgccaatagggactttccattgacgtcaatgggtggagtatttacggtaaactgcccacttggcagtacatcaagtgtatcatatgccaagtacgccccctattgacgtcaatgacggtaaatggcccgcctggcattatgcccagtacatgaccttatgggactttcctacttggcagtacatctacgtattagtcatcgctattaccatggtgatgcggttttggcagtacatcaatgggcgtggatagcggtttgactcacggggatttccaagtctccaccccattgacgtcaatgggagtttgttttggcaccaaaatcaacgggactttccaaaatgtcgtaacaactccgccccattgacgcaaatgggcggtaggcgtgtacggtgggaggtctatataagcagcgcgttttgcctgtactgggtctctctggttagaccagatctgagcctgggagctctctggctaactagggaacccactgcttaagcctcaataaagcttgccttgagtgcttcaagtagtgtgtgcccgtctgttgtgtgactctggtaactagagatccctcagacccttttagtcagtgtggaaaatctctagcagtggcgcccgaacagggacttgaaagcgaaagggaaaccagaggagctctctcgacgcaggactcggcttgctgaagcgcgcacggcaagaggcgaggggcggcgactggtgagtacgccaaaaattttgactagcggaggctagaaggagagagatgggtgcgagagcgtcagtattaagcgggggagaattagatcgcgatgggaaaaaattcggttaaggccagggggaaagaaaaaatataaattaaaacatatagtatgggcaagcagggagctagaacgattcgcagttaatcctggcctgttagaaacatcagaaggctgtagacaaatactgggacagctacaaccatcccttcagacaggatcagaagaacttagatcattatataatacagtagcaaccctctattgtgtgcatcaaaggatagagataaaagacaccaaggaagctttagacaagatagaggaagagcaaaacaaaagtaagaccaccgcacagcaagcggccgctgatcttcagacctggaggaggagatatgagggacaattggagaagtgaattatataaatataaagtagtaaaaattgaaccattaggagtagcacccaccaaggcaaagagaagagtggtgcagagagaaaaaagagcagtgggaataggagctttgttccttgggttcttgggagcagcaggaagcactatgggcgcagcgtcaatgacgctgacggtacaggccagacaattattgtctggtatagtgcagcagcagaacaatttgctgagggctattgaggcgcaacagcatctgttgcaactcacagtctggggcatcaagcagctccaggcaagaatcctggctgtggaaagatacctaaaggatcaacagctcctggggatttggggttgctctggaaaactcatttgcaccactgctgtgccttggaatgctagttggagtaataaatctctggaacagatttggaatcacacgacctggatggagtgggacagagaaattaacaattacacaagcttaatacactccttaattgaagaatcgcaaaaccagcaagaaaagaatgaacaagaattattggaattagataaatgggcaagtttgtggaattggtttaacataacaaattggctgtggtatataaaattattcataatgatagtaggaggcttggtaggtttaagaatagtttttgctgtactttctatagtgaatagagttaggcagggatattcaccattatcgtttcagacccacctcccaaccccgaggggacccgacaggcccgaaggaatagaagaagaaggtggagagagagacagagacagatccattcgattagtgaacggatcggcactgcgtgcgccaattctgcagacaaatggcagtattcatccacaattttaaaagaaaaggggggattggggggtacagtgcaggggaaagaatagtagacataatagcaacagacatacaaactaaagaattacaaaaacaaattacaaaaattcaaaattttcgggtttattacagggacagcagagatccagtttggttaattagctagctgcaaagatggataaagttttaaacagagaggaatctttgcagctaatggaccttctaggtcttgaaaggagtgggaattggctccggtgcccgtcagtgggcagagcgcacatcgcccacagtccccgagaagttggggggaggggtcggcaattgaaccggtgcctagagaaggtggcgcggggtaaactgggaaagtgatgtcgtgtactggctccgcctttttcccgagggtgggggagaaccgtatataagtgcagtagtcgccgtgaacgttctttttcgcaacgggtttgccgccagaacacaggtaagtgccgtgtgtggttcccgcgggcctggcctctttacgggttatggcccttgcgtgccttgaattacttccacctggctgcagtacgtgattcttgatcccgagcttcgggttggaagtgggtgggagagttcgaggccttgcgcttaaggagccccttcgcctcgtgcttgagttgaggcctggcctgggcgctggggccgccgcgtgcgaatctggtggcaccttcgcgcctgtctcgctgctttcgataagtctctagccatttaaaatttttgatgacctgctgcgacgctttttttctggcaagatagtcttgtaaatgcgggccaagatctgcacactggtatttcggtttttggggccgcgggcggcgacggggcccgtgcgtcccagcgcacatgttcggcgaggcggggcctgcgagcgcggccaccgagaatcggacgggggtagtctcaagctggccggcctgctctggtgcctggcctcgcgccgccgtgtatcgccccgccctgggcggcaaggctggcccggtcggcaccagttgcgtgagcggaaagatggccgcttcccggccctgctgcagggagctcaaaatggaggacgcggcgctcgggagagcgggcgggtgagtcacccacacaaaggaaaagggcctttccgtcctcagccgtcgcttcatgtgactccacggagtaccgggcgccgtccaggcacctcgattagttctcgagcttttggagtacgtcgtctttaggttggggggaggggttttatgcgatggagtttccccacactgagtgggtggagactgaagttaggccagcttggcacttgatgtaattctccttggaatttgccctttttgagtttggatcttggttcattctcaagcctcagacagtggttcaaagtttttttcttccatttcaggtgtcgtgacgtacggccaccatgaaaaggccggcggccacgaaaaaggccggccaggcaaaaaagaaaaaggacaagaagtacagcatcggcctggccatcggcaccaactctgtgggctgggccgtgatcaccgacgagtacaaggtgcccagcaagaaattcaaggtgctgggcaacaccgaccggcacagcatcaagaagaacctgatcggagccctgctgttcgacagcggcgaaacagccgaggccacccggctgaagagaaccgccagaagaagatacaccagacggaagaaccggatctgctatctgcaagagatcttcagcaacgagatggccaaggtggacgacagcttcttccacagactggaagagtccttcctggtggaagaggataagaagcacgagcggcaccccatcttcggcaacatcgtggacgaggtggcctaccacgagaagtaccccaccatctaccacctgagaaagaaactggtggacagcaccgacaaggccgacctgcggctgatctatctggccctggcccacatgatcaagttccggggccacttcctgatcgagggcgacctgaaccccgacaacagcgacgtggacaagctgttcatccagctggtgcagacctacaaccagctgttcgaggaaaaccccatcaacgccagcggcgtggacgccaaggccatcctgtctgccagactgagcaagagcagacggctggaaaatctgatcgcccagctgcccggcgagaagaagaatggcctgttcggcaacctgattgccctgagcctgggcctgacccccaacttcaagagcaacttcgacctggccgaggatgccaaactgcagctgagcaaggacacctacgacgacgacctggacaacctgctggcccagatcggcgaccagtacgccgacctgtttctggccgccaagaacctgtccgacgccatcctgctgagcgacatcctgagagtgaacaccgagatcaccaaggcccccctgagcgcctctatgatcaagagatacgacgagcaccaccaggacctgaccctgctgaaagctctcgtgcggcagcagctgcctgagaagtacaaagagattttcttcgaccagagcaagaacggctacgccggctacattgacggcggagccagccaggaagagttctacaagttcatcaagcccatcctggaaaagatggacggcaccgaggaactgctcgtgaagctgaacagagaggacctgctgcggaagcagcggaccttcgacaacggcagcatcccccaccagatccacctgggagagctgcacgccattctgcggcggcaggaagatttttacccattcctgaaggacaaccgggaaaagatcgagaagatcctgaccttccgcatcccctactacgtgggccctctggccaggggaaacagcagattcgcctggatgaccagaaagagcgaggaaaccatcaccccctggaacttcgaggaagtggtggacaagggcgcttccgcccagagcttcatcgagcggatgaccaacttcgataagaacctgcccaacgagaaggtgctgcccaagcacagcctgctgtacgagtacttcaccgtgtataacgagctgaccaaagtgaaatacgtgaccgagggaatgagaaagcccgccttcctgagcggcgagcagaaaaaggccatcgtggacctgctgttcaagaccaaccggaaatgaccgtgaagcagctgaaagaggactacttcaagaaaatcgagtgcttcgactccgtggaaatctccggcgtggaagatcggttcaacgcctccctgggcacataccacgatctgctgaaaattatcaaggacaaggacttcctggacaatgaggaaaacgaggacattctggaagatatcgtgctgaccctgacactgtttgaggacagagagatgatcgaggaacggctgaaaacctatgcccacctgttcgacgacaaagtgatgaagcagctgaagcggcggagatacaccggctggggcaggctgagccggaagctgatcaacggcatccgggacaagcagtccggcaagacaatcctggatttcctgaagtccgacggcttcgccaacagaaacttcatgcagctgatccacgacgacagcctgacctttaaagaggacatccagaaagcccaggtgtccggccagggcgatagcctgcacgagcacattgccaatctggccggcagccccgccattaagaagggcatcctgcagacagtgaaggtggtggacgagctcgtgaaagtgatgggccggcacaagcccgagaacatcgtgatcgaaatggccagagagaaccagaccacccagaagggacagaagaacagccgcgagagaatgaagcggatcgaagagggcatcaaagagctgggcagccagatcctgaaagaacaccccgtggaaaacacccagctgcagaacgagaagctgtacctgtactacctgcagaatgggcgggatatgtacgtggaccaggaactggacatcaaccggctgtccgactacgatgtggaccacatcgtgcctcagagctttctgaaggacgactccatcgacaacaaggtgctgaccagaagcgacaaggcccggggcaagagcgacaacgtgccctccgaagaggtcgtgaagaagatgaagaactactggcggcagctgctgaacgccaagctgattacccagagaaagttcgacaatctgaccaaggccgagagaggcggcctgagcgaactggataaggccggcttcatcaagagacagctggtggaaacccggcagatcacaaagcacgtggcacagatcctggactcccggatgaacactaagtacgacgagaatgacaagctgatccgggaagtgaaagtgatcaccctgaagtccaagctggtgtccgatttccggaaggatttccagttttacaaagtgcgcgagatcaacaactaccaccacgcccacgacgcctacctgaacgccgtcgtgggaaccgccctgatcaaaaagtaccctaagctggaaagcgagttcgtgtacggcgactacaaggtgtacgacgtgcggaagatgatcgccaagagcgagcaggaaatcggcaaggctaccgccaagtacttcttctacagcaacatcatgaactttttcaagaccgagattaccctggccaacggcgagatccggaagcggcctctgatcgagacaaacggcgaaaccggggagatcgtgtgggataagggccgggattttgccaccgtgcggaaagtgctgagcatgccccaagtgaatatcgtgaaaaagaccgaggtgcagacaggcggcttcagcaaagagtctatcctgcccaagaggaacagcgataagctgatcgccagaaagaaggactgggaccctaagaagtacggcggcttcgacagccccaccgtggcctattctgtgctggtggtggccaaagtggaaaagggcaagtccaagaaactgaagagtgtgaaagagctgctggggatcaccatcatggaaagaagcagcttcgagaagaatcccatcgactttctggaagccaagggctacaaagaagtgaaaaaggacctgatcatcaagctgcctaagtactccctgttcgagctggaaaacggccggaagagaatgctggcctctgccggcgaactgcagaagggaaacgaactggccctgccctccaaatatgtgaacttcctgtacctggccagccactatgagaagctgaagggctcccccgaggataatgagcagaaacagctgtttgtggaacagcacaagcactacctggacgagatcatcgagcagatcagcgagttctccaagagagtgatcctggccgacgctaatctggacaaagtgctgtccgcctacaacaagcaccgggataagcccatcagagagcaggccgagaatatcatccacctgtttaccctgaccaatctgggagcccctgccgccttcaagtactttgacaccaccatcgaccggaagaggtacaccagcaccaaagaggtgctggacgccaccctgatccaccagagcatcaccggcctgtacgagacacggatcgacctgtctcagctgggaggcgacagcgctggaggaggtggaagcggaggaggaggaagcggaggaggaggtagcggacctaagaaaaagaggaaggtggcggccgctggatccggacgggctgacgcattggacgattttgatctggatatgctgggaagtgacgccctcgatgattttgaccttgacatgcttggttcggatgcccttgatgactttgacctcgacatgctcggcagtgacgcccttgatgatttcgacctggacatgctgattaactgtacaggcagtggagagggcagaggaagtctgctaacatgcggtgacgtcgaggagaatcctggcccaatggccaagcctttgtctcaagaagaatccaccctcattgaaagagcaacggctacaatcaacagcatccccatctctgaagactacagcgtcgccagcgcagctctctctagcgacggccgcatcttcactggtgtcaatgtatatcattttactgggggaccttgtgcagaactcgtggtgctgggcactgctgctgctgcggcagctggcaacctgacttgtatcgtcgcgatcggaaatgagaacaggggcatcttgagcccctgcggacggtgccgacaggtgcttctcgatctgcatcctgggatcaaagccatagtgaaggacagtgatggacagccgacggcagttgggattcgtgaattgctgccctctggttatgtgtgggagggctaagaattcgatatcaagcttatcggtaatcaacctctggattacaaaatttgtgaaagattgactggtattcttaactatgttgctccttttacgctatgtggatacgctgctttaatgcctttgtatcatgctattgcttcccgtatggctttcattttctcctccttgtataaatcctggttgctgtctctttatgaggagttgtggcccgttgtcaggcaacgtggcgtggtgtgcactgtgtttgctgacgcaacccccactggttggggcattgccaccacctgtcagctcctttccgggactttcgctttccccctccctattgccacggcggaactcatcgccgcctgccttgcccgctgctggacaggggctcggctgttgggcactgacaattccgtggtgttgtcggggaaatcatcgtcctttccttggctgctcgcctgtgttgccacctggattctgcgcgggacgtccttctgctacgtcccttcggccctcaatccagcggaccttccttcccgcggcctgctgccggctctgcggcctcttccgcgtcttcgccttcgccctcagacgagtcggatctccctttgggccgcctccccgcatcgataccgtcgacctcgagacctagaaaaacatggagcaatcacaagtagcaatacagcagctaccaatgctgattgtgcctggctagaagcacaagaggaggaggaggtgggttttccagtcacacctcaggtacctttaagaccaatgacttacaaggcagctgtagatcttagccactttttaaaagaaaaggggggactggaagggctaattcactcccaacgaagacaagatatccttgatctgtggatctaccacacacaaggctacttccctgattggcagaactacacaccagggccagggatcagatatccactgacctttggatggtgctacaagctagtaccagttgagcaagagaaggtagaagaagccaatgaaggagagaacacccgcttgttacaccctgtgagcctgcatgggatggatgacccggagagagaagtattagagtggaggtttgacagccgcctagcatttcatcacatggcccgagagctgcatccggactgtactgggtctctctggttagaccagatctgagcctgggagctctctggctaactagggaacccactgcttaagcctcaataaagcttgccttgagtgcttcaagtagtgtgtgcccgtctgttgtgtgactctggtaactagagatccctcagacccttttagtcagtgtggaaaatctctagcagggcccgtttaaacccgctgatcagcctcgactgtgccttctagttgccagccatctgttgtttgcccctcccccgtgccttccttgaccctggaaggtgccactcccactgtcctttcctaataaaatgaggaaattgcatcgcattgtctgagtaggtgtcattctattctggggggtggggtggggcaggacagcaagggggaggattgggaagacaatagcaggcatgctggggatgcggtgggctctatggcttctgaggcggaaagaaccagctggggctctagggggtatccccacgcgccctgtagcggcgcattaagcgcggcgggtgtggtggttacgcgcagcgtgaccgctacacttgccagcgccctagcgcccgctcctttcgctttcttcccttcctttctcgccacgttcgccggctttccccgtcaagctctaaatcgggggctccctttagggttccgatttagtgctttacggcacctcgaccccaaaaaacttgattagggtgatggttcacgtagtgggccatcgccctgatagacggtttttcgccctttgacgttggagtccacgttctttaatagtggactcttgttccaaactggaacaacactcaaccctatctcggtctattcttttgatttataagggattttgccgatttcggcctattggttaaaaaatgagctgatttaacaaaaatttaacgcgaattaattctgtggaatgtgtgtcagttagggtgtggaaagtccccaggctccccagcaggcagaagtatgcaaagcatgcatctcaattagtcagcaaccaggtgtggaaagtccccaggctccccagcaggcagaagtatgcaaagcatgcatctcaattagtcagcaaccatagtcccgcccctaactccgcccatcccgcccctaactccgcccagttccgcccattctccgccccatggctgactaattttttttatttatgcagaggccgaggccgcctctgcctctgagctattccagaagtagtgaggaggcttttttggaggcctaggcttttgcaaaaagctcccgggagcttgtatatccattttcggatctgatcagcacgtgttgacaattaatcatcggcatagtatatcggcatagtataatacgacaaggtgaggaactaaaccatggccaagttgaccagtgccgttccggtgctcaccgcgcgcgacgtcgccggagcggtcgagttctggaccgaccggctcgggttctcccgggacttcgtggaggacgacttcgccggtgtggtccgggacgacgtgaccctgttcatcagcgcggtccaggaccaggtggtgccggacaacaccctggcctgggtgtgggtgcgcggcctggacgagctgtacgccgagtggtcggaggtcgtgtccacgaacttccgggacgcctccgggccggccatgaccgagatcggcgagcagccgtgggggcgggagttcgccctgcgcgacccggccggcaactgcgtgcacttcgtggccgaggagcaggactgacacgtgctacgagatttcgattccaccgccgccttctatgaaaggttgggcttcggaatcgttttccgggacgccggctggatgatcctccagcgcggggatctcatgctggagttcttcgcccaccccaacttgtttattgcagcttataatggttacaaataaagcaatagcatcacaaatttcacaaataaagcatttttttcactgcattctagttgtggtttgtccaaactcatcaatgtatcttatcatgtctgtataccgtcgacctctagctagagcttggcgtaatcatggtcatagctgtttcctgtgtgaaattgttatccgctcacaattccacacaacatacgagccggaagcataaagtgtaaagcctggggtgcctaatgagtgagctaactcacattaattgcgttgcgctcactgcccgctttccagtcgggaaacctgtcgtgccagctgcattaatgaatcggccaacgcgcggggagaggcggtttgcgtattgggcgctcttccgcttcctcgctcactgactcgctgcgctcggtcgttcggctgcggcgagcggtatcagctcactcaaaggcggtaatacggttatccacagaatcaggggataacgcaggaaagaacatgtgagcaaaaggccagcaaaaggccaggaaccgtaaaaaggccgcgttgctggcgtttttccataggctccgcccccctgacgagcatcacaaaaatcgacgctcaagtcagaggtggcgaaacccgacaggactataaagataccaggcgtttccccctggaagctccctcgtgcgctctcctgttccgaccctgccgcttaccggatacctgtccgcctttctcccttcgggaagcgtggcgctttctcatagctcacgctgtaggtatctcagttcggtgtaggtcgttcgctccaagctgggctgtgtgcacgaaccccccgttcagcccgaccgctgcgccttatccggtaactatcgtcttgagtccaacccggtaagacacgacttatcgccactggcagcagccactggtaacaggattagcagagcgaggtatgtaggcggtgctacagagttcttgaagtggtggcctaactacggctacactagaagaacagtatttggtatctgcgctctgctgaagccagttaccttcggaaaaagagttggtagctcttgatccggcaaacaaaccaccgctggtagcggtggtttttttgtttgcaagcagcagattacgcgcagaaaaaaaggatctcaagaagatcctttgatcttttctacggggtctgacgctcagtggaacgaaaactcacgttaagggattttggtcatgagattatcaaaaaggatcttcacctagatccttttaaattaaaaatgaagttttaaatcaatctaaagtatatatgagtaaacttggtctgacagttaccaatgcttaatcagtgaggcacctatctcagcgatctgtctatttcgttcatccatagttgcctgactccccgtcgtgtagataactacgatacgggagggcttaccatctggccccagtgctgcaatgataccgcgagacccacgctcaccggctccagatttatcagcaataaaccagccagccggaagggccgagcgcagaagtggtcctgcaactttatccgcctccatccagtctattaattgttgccgggaagctagagtaagtagttcgccagttaatagtttgcgcaacgttgttgccattgctacaggcatcgtggtgtcacgctcgtcgtttggtatggcttcattcagctccggttcccaacgatcaaggcgagttacatgatcccccatgttgtgcaaaaaagcggttagctccttcggtcctccgatcgttgtcagaagtaagttggccgcagtgttatcactcatggttatggcagcactgcataattctcttactgtcatgccatccgtaagatgcttttctgtgactggtgagtactcaaccaagtcattctgagaatagtgtatgcggcgaccgagttgctcttgcccggcgtcaatacgggataataccgcgccacatagcagaactttaaaagtgctcatcattggaaaacgttcttcggggcgaaaactctcaaggatcttaccgctgttgagatccagttcgatgtaacccactcgtgcacccaactgatcttcagcatcttttactttcaccagcgtttctgggtgagcaaaaacaggaaggcaaaatgccgcaaaaaagggaataagggcgacacggaaatgttgaatactcatactcttcctttttcaatattattgaagcatttatcagggttattgtctcatgagcggatacatatttgaatgtatttagaaaaataaacaaataggggttccgcgcacatttccccgaaaagtgccacctgac

SEQ ID NO: 13 - RNA, 20 nt, synthetic construct
  source 1..20: mol_type = other RNA
tgcgaatacgcccacgcgat

SEQ ID NO: 14 - RNA, 600 nt, synthetic construct
  source 1..600: mol_type = other RNA
tgcggagagcgaagggaactggagagccatgtagatccaggctctcgcccgcccgcctccttcgggatcgaatcaagggctcccatagtgttaggagggggcgagagtgctgtttatcgtcatttgcctcggagcttcgagagagggtggtattttgcttttccgccccgcatcctccggaactccctgcaccggagagaggacggcgtctccaggttgctggcaaccggtgagaatgggggtagggaaggaacattttcgccgtagctgctccgtaaagcgattgtccaactgagaggggcgtcggacgagtggaccagggcggcgagtttgcccggcgcgtctcggatgctgctgcggcggccgccgcggctcccgccagggcactgcaaagacgacctgccgcattcccactcgggctctccgctgactcagcaccgcccctgcgccaagccagccggccaggtagggggttccccagctcggggatgcagaagcgggggttggggggaccgggtgggggaggccgggggtgcggggatgctgtccgggaccctgagcttcccccggcgtctctcggcgcttttccgatctctagtt

SEQ ID NO: 15 - RNA, 600 nt, synthetic construct
  source 1..600: mol_type = other RNA
cgtcaccccagaggcgctctccgacctgcagcccccagggctcctggccctttcccgtttgccactgcggcttgttgtcaagaaatggaacttcagaaaacccccagatatacactgcgttaggtaaggatttcattctaatcgagtccaatgtgaccctggctttccctcccgtagttatgcattcctgtctatgagtgagatgaaaagaatgtccacaggccagcttctttcagaagcgcctaagagatgcgcatgtaaggggtgccatggagcacccgggaaggacccaggcctgggcagggaggcgttggggccggctctagggagcaaagctgtcggagtccaggcctctatcacccgactgctgacactgccctcccatccctgctctacaagcgggcggtggtgactacacgaggcgccgaagatgctgttgagggccctggagaaacttcagcagaacagggcctctccccttgcaggccgagccgggggccctgcgccctccccctccgcccagctcggccaagggcgcatttgctgagcgtctggcggcctctaccggagcacctctgcagagggccgatcctccagccc

SEQ ID NO: 16 - RNA, 600 nt, synthetic construct
  source 1..600: mol_type = other RNA
aagtgcagctggcagcataaccatgtctggtaaatagcgcgggttggtaggacctgaaccacttgggacggccgggctgcattcgcctcttcggcacagaataacaaacggctttgctgcagagagggctttccccttcgctggggccgtgggctgccgccgagcccccgcgcttaaaaggaagctgagatctggggcggcagcctggcgcaggctactccccacccccagagatcaggttccgggattttgggttggacactgagcctcggcggtccctcggctggacgccgggggcttaagagctgaactgcgcttgggcccgcagcaggagccgaccgcgcgggcaggagggggttaaggtggcgctagcggccgcggccagcgggagggtctggtcctctgcgcggaggcgagcgctgagtgcgccgaacggaatcccggccggagcccggggcgatggggagagggcccagacccctccccgccctggggccggcgggattgggtcggcagggggccagtccggaagccggcttcctccaggctccccctctcgctgctgccaagccgcctcgcagctaggcaggcggagcgttt

SEQ ID NO: 17 - RNA, 600 nt, synthetic construct
  source 1..600: mol_type = other RNA
ggtggattatacacagagagggtcccgcacttctgtttcccttccttgtcatggaaggagagaatgaattacgtgggggacccagggggataggaaaatcaatcattcatgacagttaataagtgtcagaaaagtatgtactcacattcatcccctgaaagtcacattcttcatctgttctgatttgtctttcactgatggcattagccaggtaggctcagcaagaaacatcaaaaggttttagcccaatattgtggagagagtttcatttagcttcattttttccagccggggctggctccaaagctagtttttcttactaggttgtttgctacatgaaaagcagactcccagaggtttctgagattgccgacatcctatgcaagatgactgctcccacccacccgcccacccactcactaataagacataatgccgtcctatttttggtaacaattaaagggcctcccggtgaaagcagaaagctgtttattttctgtgacatcacttcactttgccttcgaaggctggtctgtgctcagtgttttcgtggtgatgcaagtcggctctctcctccagcagttggatccctcccatctc

SEQ ID NO: 18 - RNA, 600 nt, synthetic construct
  source 1..600: mol_type = other RNA
aaggagtccaaaggggttaataggggtccaggattgattgttagtggagggcgtagaggataacgtggtgtgtgtgtgtgtgtgtgtgtgttggggttcatgcaagacattacccatggaaggaacatggggcctccaggttccgcgagaagggtcggtattaaaggattccttggagcggtcagcactggtccgggccagggtgtctctgatgacaaaactccgggagagctttgtctcaccagggatcagatggtccctggtttggaaggcaaggggagggtgccaacgcccttctcacctcagtctgacccgggggcgcgggcccagacgtctctcggagcccccgcccctggagtggcgttccccgagggcggaccgtgggcgggtcccccgggagcagcaggagccgcgcggggcgggcgcccccagcgccgaggttgagggaggccgggctcggtgcggggctgggaggggggcgcggaatcagggctttttaggacccagcgcggcgccttcctccgggggcgagtgcggctgcgcgcgccgtgtgcccgtgtccggagagcggcgggctggacgcggaccgcgcgaacgagc

SEQ ID NO: 19 - RNA, 600 nt, synthetic construct
  source 1..600: mol_type = other RNA
acggggacgaggaggagtcggaggcggcaaggaggaagagcgagcggaggccgaggggctcagcggcgtggcgacaggactagggggtcccgagaacatgggctagcaggcggccacgggccggcggccggacgcggtgaacctgccgcggccgggcgcgcactggcgcggcgagccggagccgagcgcagccgggggaggagggctggcgcaggggcgcccgggcggagggggccgattatccattattaacgagttaccacctaataagcggagagcggctcgttagccgcgcgggaggcgctcggggaagggggtcaccggccgagcgcagcgcacacccgtggcgcacggcgggcggcgcggcgccgaggacacccgggaccgcgcgcggagccggggcgggcccgggggcggcgcagaccccgggcgcgggcggcccgcggcgccccctggctctcggcgctcggggccagcgcagcccggggcgagcggggcgcgggccggggagggggagctgcccgcgcactccatccccctcccccccgggcgggcggcggcggctcgctgtatatatctcggcgcaccccgccaggtcgc

SEQ ID NO: 20 - RNA, 600 nt, synthetic construct
  source 1..600: mol_type = other RNA
atttagataaggtaagataaaaaataaaagcctatatggaacgcagccaacgattcatctgtttgcattaataggttccagcaatggttctacaggcacggaaagccaagccggtttgccactgcacttagcaagcacatgagcttaaaaataaacttttgacaatgcagatctctttgtccttttgggaatggaaaacattatgtacttcaaagcatactaagcctgatttgaaaatatagttgggatattgttactgtggcagttgggagggtctttagccttcacacagtgcgtggatgcttcgtgtgtaaatgcttgagccacaaacttgtgagaataagtgacgctggcaactttgatatgctcattcataaggaagaaacttctgtcttttaaattctctggaacaactgggatatagttcctcattttaatcagggaatttcttcctgaaccagactgtaaaaacagaggatttgagtagcacatttcacttgcatacagcagcgtttgttcgttttgagtgtttttgtacaggaaactgatctacagggtaacattcacacacaaaaaggaaacagtatgggacgatggctt

SEQ ID NO: 21 - RNA, 600 nt, synthetic construct
  source 1..600: mol_type = other RNA
cgtccactcccagggcccagctgagaagactccagtcctgctcaggcggctgggcaccgctctgggaccccaggagcgctggggccaccaggcaggtccacttggttagtactaccggactcaaaggtgaccgcagggtcagtgtgcacatggccgggggattgggcaggctcagcccagagctctggtcccgcgggccttggtcccttctgcctccccctcctctccccctgccctcccctccccctcccccactccccctcctctcccccctcccctccccctccactcctgtctcccccctccactcctgtctcccctctccccgtccccgccactctcctcccctcccattcccctctcctcccctccccctcccctcctgtctcccctctccccgtcccctctccctcccctcccctccctttccctcttctctcctcccctctcctctccttcccccctcccctcccctccccgtccctccctctcccctcccttcccctccctctcttctcctcccctctccttcgactggcgtcgcgggggttaacgcggggcggggcgaggcggcgggcggagccggcgcggccgcgggcc

SEQ ID NO: 22 - RNA, 600 nt, synthetic construct
  source 1..600: mol_type = other RNA
aatcaaagattctgactgcatttcttcagtcctttgcccacccagacaggtgaaggtgctattcaaagattgggggaggagagggccgcggcatccaccatgaaccacgaactagagggaagagggaagagggaagagggaagagggagtcacgagcttcgctaccacagagcaggtgcgttcgcggtgcgcccggccttgaccaacccgacaacttggcttttacctctgaagccgaggagcaggggtagggggtgagggaaattcacaaagctgcaaccacagagccaatgtttggtgggcgacaaccccccagtccctcctcccttcctcttcttcccccaactgcccgccgtcacgccccatccaggggaagccccaacgcccacgggagctccaggagccgggctctgcagccgcctggcgcactgcctggttgcaacgggggcggcggtagcccaggcgatcctgggtccccagacaatcagcggtgggggtcggcgggaagaggcggggcgccgccgcccgggcctcccgccgcgacggggcgggacaatggggccccaccccggggaaggagggagggagggacgcggcgtg

SEQ ID NO: 23 - RNA, 600 nt, synthetic construct
  source 1..600: mol_type = other RNA
tcagtaaggtcttccttttaatgaaaagcagcccccaaatcattttcttttctaacaaaaagcaacctggaaaatcgagctgcagacacagacaagcaagctgaaagcttgcacaggcaaataccggcagttgtgccaataaaaatatactacctggggccggcgctgtggctcacgcctgtaatcccagctactcaggaggctgaggcaggagaatcgcctgaacttaggaggcggaggctgtggtgagccaagatggcgccattgcactccagcctgggcaacaagagcgaaactccgactcaaaaagcgacaacagcagcaacaacaacaacaaaaaacactacctgggattaggcatgttctaaatggcagctccatcttctctttttgccacccatgtttacagaaacgagtggacaagacggcccctgccaagtgggaagcctatttgcataacaagattagggtggggtgaccagccttccctgcgcgctacgtaaacgtcacccctggtcgaaccaatctctgggctccacgtaaatcagacaccgcctcctcaagcctgcccgtaaaacctgctgccgtcagtcacgggcc

SEQ ID NO: 24 - RNA, 600 nt, synthetic construct; identical to SEQ ID NO: 14
  source 1..600: mol_type = other RNA

SEQ ID NO: 25 - RNA, 600 nt, synthetic construct
  source 1..600: mol_type = other RNA
gttgggacccgaggcaggggaatgcgcttgattttatttccaaagagaaacaccgtccttgcttgggccgagggctcgttcaggggcctataggagctaccgggacaagaaggggaggtctctggttggggtggaggacgaagggtgggaactacccgattgccccccaggaatgggggatgttgcgcaccagtagaggggactggacaggaatcgtggtggtgggggtggggggttaactggaggggacagcagccctgcttgaaactctgacccctaagaccgtgtggtggagaagggcagctgcaacctgaaccaggagtgcgagctgctcctggggcgcgctgaggagggagaagcgaactggggacttgcaaggagggcaggagtgcccgaggagccgctggcctgcagcggtgccggaggagggcggtgacgaggttggagaggggcgcagggacccgcagggagcccaggcttaacgtgcattctgcggttctctcccccacctcccgcctgcccgcgcaggtgccgccgccggacgggactttaagatgaagttatgggatgtcgtggctgtctgcctggtgctgctccaca

SEQ ID NO: 26 - RNA, 600 nt, synthetic construct
  source 1..600: mol_type = other RNA
tggggagcgcagctttgggaccctctagccggagacttccggcagctgcctccgacttgttctaagtacaggaaaaatctgtgcgcccagttgcctcactccaacagcgcgcagttgtgcccggcgaggatgccgcgctagtcgtggagatgccccaccacaaagaggattcaggtgcttcctactccggcacccagtgggttggtagtcctgttggcaggagacaagaatcgtctgggctgctcctatctctggcaggactagacggggcgtgaaggaaagaaggaaagaaggaaagcagggatcgggcactgcccgagggcagatacttgggctttggtgttgtccagcgcgctcggagtgcgctgcctcgctcacgcggtcccaggccccgcttcttcaggcagtgcctggggcgggagggttggggtgtgggtggctccctaagtcgacactcgtgcggctgcggttccagccccctccccccgccactcaggggcgggaagtggcgggtgggagtcacccaagcgtgactgcccgaggcccctcctgccgcggcgaggaagctccataaaagccctgtcgcgacccgctctctgc

SEQ ID NO: 27 - RNA, 600 nt, synthetic construct
  source 1..600: mol_type = other RNA
gagcacagggaccgcccagctagaggagcaccagcgcactgcgccccagccctgggcgagggtgcggaggatttgttctcggtgcaatcctgctggcgcttttccggggttctgcgcggatccagctccccatctctgctcctacacacacaaaagaaaacaactctcgattggaagttgtggaattttctcagcccctacgaggcgcggggattctccagccccggccctcctcccgccagcctgaggtctccttcgctcgcctgccttgctagggaccgcagtccctcagccgcagctgggtctgtccgccccgcctttgccctcgccttttcccggggcggatttggtgaagtcggcctcaagtccaggaggtctgtcttcgccgggccagctctcgcggaactggggggtagagagcaaagggagagattcgtggaagggaagggaggtaggggtggcgcaaacgcccagagtatcaaacttgggggtggcacagtaggtgacagcagcagctgcaggtggtggctggggacccgcgagggggcgcccctctgggtagggtctggctgagcgggcttgcaagcccgggaggcggct

SEQ ID NO: 28 - RNA, 600 nt, synthetic construct
  source 1..600: mol_type = other RNA
tccggcctagggacgcagccatgaacaagacacagttgacacccctcatggggtctcctttagccagggtggtaggtggggggcggggagatagacagctcacaagtaaacaaataaacagggtctaccgtgcaagacagaagaaatgcaactcagtgagggagctgcggaggcttggagggattgatgggggcagaggggacagggctacggagacaccagtggcaggtggagacaaccaaggaagacacaggtcaaggcccagacgcagataagagggagggagggagccctcgaatagctgcaaagtctggaacaggacagctggaagataaaggggcacagaaggagggggaagggcagggtctaccaggggaaaccaaggcacagcagcatttcccgcgatgaagtgtgtgttttgacctcacagaccagcgtttgaaagcccctggagtggatgactgttcccccacctccatcctcttcactccctctcccttcttctaatcccctccctttcccccctcccttctattgtctcctcagaaggcataaaagctcagggggcgtgaaagagtccaggcgctggagcgaggagcc

SEQ ID NO: 29 - RNA, 600 nt, synthetic construct
  source 1..600: mol_type = other RNA
aaaagagctctcgccctgtggacgactcggaatccctggaaaagccgggagggagtcggaggcgccagcccactggggaggtggcgctgggcgcgcgggatgcgcggggagccttctctgcaggagccgcacagtgcactgctgcgcgctgggcagtgcggggaagcgccgcgggaaggagcggctccgagcaacaggtgcagcacgcagcccctccgggagccagggaaaaccgccggcgaagatctggagcggtaaggcggagagaagggtctttccacctgcgcggctgcagccggcggatccctcttcccaggctccgtggtcgcgcagcgggcggaggcgcccgggaaggggaccccagtgctctcgagatcaccgtcccttcccgagaaggtccagctccgggctcccgaacccaccctctctcagaaggtcccggcgcaaagacggtgccaccaggcacggccaccggatccccgctcccgctggctcgcgcctcgggggaagctcagactcctaaactcgcactctccgtgctttgcgccgggacccctggccacccccggcgcctactatcccgccctccctccccgcgcg

SEQ ID NO: 30 - RNA, 600 nt, synthetic construct
  source 1..600: mol_type = other RNA
actgtctcagcctctgtctgtctccacgtctgtctgtctgtggatcagtgtgttttgagtctgacagtctacctggctggtttccttttttcttgctctgtccctctctccttgtgtttctacccatctccctatctctgccactctctgtctctgtttttctttctctttctcccctcctttgtatcactccctaggtccgacattgcctctttctcgatttccgattctctctgagtctctctctctctctctctttctctaactcttctgtctctgtccttccctgtcttctttttcctgtgacactctcctggaaacgcatcaaaaactgaagtggccggatttcaagtgacaaacagcactacacccagaatccgccccctccccaacacggctgccttcctcctccacatccctgtcacgaagagaagcctattgtgtcaggcccagggagttcgagttgaagggcctgggggtctgtgctctgactgctctcagccacttccccattggctcccagcagcctgtgctcagcaagggctgagcgacaggggaggctctcgtccataaaaggggggaagaggcaccagaactgcc

SEQ ID NO: 31 - RNA, 600 nt, synthetic construct
  source 1..600: mol_type = other RNA
gagtaaaccaatagcccccatgctctgtgcgatttcattgtgtgctcgcgttcgcaagctccgtagtgcaggaaggtgcgggaaggtgtgtctgtggcccgggaaacgcacgccctctcccagagaacttgggtgctgggatggggaggaaggggagagttgaaagctaggggagcgagacctcggggcgtgcgattctcactcgctccctcccgccccagcgcccacagccggggtttctgcagagggcgcgggacgcggggttccccggggctgaggctggggctggaacacccctcgaagccgcgggcgtcctgtccaaggcgccccaggagggcgcaggactcgcagggcgatgtcgcggggccctaggggaggaggtgaggacaggccccgggggagcggggagttccgggcgcccctcggttccccgcgcgaggaaaagacgcggcgttccctttaagcggccgcctcgaacgggtatcggtagcgcgggcgagcggggagcggggggcggggggcgggggggggggggcggcgccgtttgaccaatcgaagctcaaccgaagagctaaataatgtctgacccgggcgcaaggc

SEQ ID NO: 32 - RNA, 600 nt, synthetic construct
  source 1..600: mol_type = other RNA
ttggtagacgacttcagcctctgtcctttaattttaaagtttatgccccacttgtacccctcgtcttttggtgatttagagattttcaaagcctgctctgacacagactcttccttggattgcaacttctctactttggggtggaaacggcttctccgttttgaaacgctagcggggaaaaaatgggggagaaagttgagtttaaacttttaaaagttgagtcacggctggttgcgcagcaaaagccccgcagtgtggagaaagcctaaacgtggtttgggtggtgcgggggttgggcgggggtgacttttgggggataaggggcggtggagcccagggaatgccaaagccctgccgcggcctccgacgcgcgccccccgcccctcgcctctcccccgcccccgactgaggccgggctccccgccggactgatgtcgcgcgcttgcgtgttgtggccgaaccgccgaactcagaggccggccccagaaaacccgagcgagtagggggcggcgcgcaggagggaggagaactgggggcgcgggaggctggtgggtgtggggggtggagatgtagaagatgtgacgccgcggcccggcgggt

SEQ ID NO: 33 - RNA, 600 nt, synthetic construct
  source 1..600: mol_type = other RNA
taccccttccctcgtcttttctcaattccatgtcctgtctccctttcttaggcttctgtctacccagccccaggctcccttccacgaccccaccactccctcaaaccagcctcccttccgtacccaactcgttccctccaaaaccgtttcctctcccccacatcctcagtgcttcactgtatcgactcatactcccacttcagacctcaggcgccagccccgtttctctcccgtcccactcgcatccttcccttcctaccctggttcctccgtgcttcagcctcccgcggctccctccgcccaccccgccctcctggcacgccccgtccccatttctcctcccctcgggtccccttaagtgagatccctcccttcctctttcgttcctttcctcctcgaggttgcatcccccctcccctccccgcccctccgactgtcgctcccacctcggcgctcgcttccctccccgcccccttcctgcctccccagctcccgcccgcccccccaccccccgctgccgcgcgccgcccgtgacgtcagagccccctcccagccccacatctccctcctgctcctcctcctcccctccgtcggtcagtc

SEQ ID NO: 34 - RNA, 600 nt, synthetic construct
  source 1..600: mol_type = other RNA
ggacgccttcgtggaacattctcctgcccagaccttcccggccagacctccgagaagcggttccaaaccaccgtgcaggtgctacaggcagcgctcggcggagcggcggcggccactgcgtgtgccagcgcgcggtcccggttcccagatcgctgtccccgggcgctctggtgcctggaggtcagcggtcggcgggcagcggcagctggcgcagcggagggccgggggcgcgtgtgtgcgtgtgctgggaaggtggccctccccgcggccgccgcagcgccagcgcctccccctcccccggcgcgcacggctcgtccccgtccctggaggcggcccgagccgcccctgagcagcctcgccttcgcctcccgcgtttcctgccgtccgccctcccccggccgagctccaggggctgccgcctagcagctcccggcgggagagcggttcagagcgcgcacgggggcgggcggaggcggcccggtgcggggcggccgcgctggagagaggcgcgcgcggagacgccggcccccctctccgcgtttgctcgcttgctccccgcctcccgcactccgctcgctcccaccccttcccggcgtgatt

SEQ ID NO: 35 - RNA, 600 nt, synthetic construct
  source 1..600: mol_type = other RNA
gtgtctggcttcatataattcagtccttggttaatacaaagttagtatattagagtacaaaaattaatgaagtttcaatttggaaattaaacagtatgtgtttctagacatagaaagatgcctggaattttacctttaggattttatctgtagctggcagcctattaaagctgtttccgcgtgcctttttctcttttgtgcctacgtcaccgatttaaggttcctatttatttatttatttttaagaagaaagaagaggttctgtaggaaacattgactgtatccgacaaccatagcaggactagagaaggaccaatgagggggtgctgggggtagctttaagaggcgaggtggtagcagaaaaggataagaagaaagataattcagcagtcccctataatcttattccacccaagaaatttgggagaatgcgaaaaagcagcagcccagcattcccggatgggcgtggcttttctccaggggctgtccaattgaattccttcagagggagaagattgataagggttgctaggaaacaggagcgtctgcctcccgcctgacccagagattgttctgcacaaaccctctccaggggctcgc

SEQ ID NO: 36 - RNA, 600 nt, synthetic construct
  source 1..600: mol_type = other RNA
ccatccagtgctggagggagaccagcgggtggggtgtttccctagcctggtggggttttgaggtggtaagggggctctgtggaaagtgtcccctggacaggctgtgagatctggggcaagtggagtcacctcactgggcctcagtttctccccttgttatatacttgaatcaggagcagtggggtgtgcaaatgaacatgccacatgggggcatacgccacgtgcgcgcggatgtgtgaggttccagtgacgcaccagggtgggagtagcgcgcccctctgcgtccctgtgctttgctgtacttttctgggtgtgtgttagggaggctatgttcctgaccctccccctctggggtgagaaggggtccccgccatgtcctcggggtaggtgagctggcacgcgcacggggaggaggaaggggggggcttccggaagagggcgccggtggggtgtggtggaagggggagctgccagcagggcgggtgtggaggggtggcggagcgccgcgagagccctggccttccggaggtggaggtgtggggtagggggtgggctccaggtgctctctctttaaaaggccggcagaagcgccgtgagctt

SEQ ID NO: 37 - RNA, 600 nt, synthetic construct
  source 1..600: mol_type = other RNA
tcagctcctggccctggaaacccctttgggtaaagcgtctttaagtcaagaatcaggctcctgtgtgcacgtgtggctttcttagcaaaaaactagcacaggcggctcaggagtagagtctagctagggtcttcccgcgcccctccctcactggtttctctgcccctgcctcgctttctcccagagctaagagcctaggctccggacctagggtttgggagcagtcagcacgacgtcctcgccccatcccgcggctgatgacacccgtgcccagaacgtgggtgtgggtagggaggcttccacagtgagttagggtcgagagctaggctctcgcttgctccccgcaatccctagattccctggggaccacgaaactcccattccgaggaaacctccccccattccccagccgcccacccgtttcccccccttacctcagcacgcagcccctccctgcgtgatgatgcaaaccagtggggagggctggcgctgggaagggtggggagagaaggagagccagcgagggagggagggagtgggaggaggaggagagggagccgaacgaccatttaaagcgatagcagtccctgccctctcccc

SEQ ID NO: 38 - RNA, 600 nt, synthetic construct
  source 1..600: mol_type = other RNA
tacgatctgggaacagaaccttaaaacaactgcatttcaaataacccgaaaaaaatttctctcatcaattttttttcagtcttgtgtaattaattctcattctattggatcttgggttagcagttgtgtgaaaccgcttttcagctatagagttatgggaatcctgactcagtttaccggtacagtctgaaagttaccaaaaccatgtcagctcagctttgaagagtcaatagtttggagtacctaatgcggtctcttccacgaggctctgagactgtcttttgatgaagacacaagatccggcctgtagattatagcagagtcttaaagtaagcatcaaagcaaaagaaaaactgtctacaaataacacagacttgaggctacagttaatttattactggtatttttcaaatgtggacagtgcagcaaggttcatgataagaacaatgcaactgacaaggaaatttacttgtttctgcgccaaacaaagacaaaaaaacctcttccccagttgccctcccaatctcagccatatagacagcccacgcaggtaccgagccctggggtttcagggattcagccacaggaagtgggggcagg

SEQ ID NO: 39 - RNA, 600 nt, synthetic construct
  source 1..600: mol_type = other RNA
aaatggctttcttcctaagtcctagtaaaaaggtcaaccgttgctgtgttgctcaccttgtgctattccagttgaagaagattaatttcaatgacatgaccatttattggtgctttgcatatgtgaagtagaaatattttcttaaatattttctctaagtatgcaaagcacctttaggagagtgtgtggctataatttaacagtgacagtgtgtgctttgcacactgaccaggattaagttcatttttattaactgggttgcttgctattaaataaaccttaaattaaaccacttttgttatcaatgaaataaaccatcatcttaaaatatgattatttaccttaaaaaaaataattttattttgtattcatgctaaggcagtctgtatggcatttggggaggaaaagattctttctggattaaaaggagccataagataatggaaaaggtcttcaaacgtgtaattaagattaaattaatcatctttttttctcaataagcatattattttgctgagtcactaagtatatttaaatgatattgcattggattaagaggattaatgcttaacctcacttctttgtttgcttaggactgcc

SEQ ID NO: 40 - RNA, 600 nt, synthetic construct
  source 1..600: mol_type = other RNA
aaggagagtgttttgcccttctcagatactatcagcaattcaggtaatacccgtaaggtgcagtttgtctgcagcctgtcatcccagttagagcagacggaatggaagagaacgcaaggaaatattctatttatgtgtcttttaagtcattattttatgaactggtcttattctaactggatcattttgttactttctttggatgggccattctaataagcgtagttcctgactgcgaactatgcagataagaagttctagacacaatatgaaaatccaggtgcatacttgcactaaataggcatgctcctcctttttactaaatctaaatggctcagtctcaggtcttggggaaggctgcatggccggggaccaggcggtgtgccgctcgggcagttagtgggccgggcgagcctgcggggctggaggggacgcggggctgggaggctggggagctgggggctgactccgggcgggcggggcggggcagggacctgccggcctggggcgggcgcaccagacgagctctccgcccgcaggcccccagcgcccagccgcgtcccggctgcgtcccgccggtcccgccccgccccgccccgc

SEQ ID NO: 41 - RNA, 600 nt, synthetic construct
  source 1..600: mol_type = other RNA
ttactggatgccacaaccttctgatttctgtaaccacttcttatgcctcctacccactgaaacaaaatcagaggcaaacagagcttcaccctagaaattggggaaaatgaggaacaggttttctgcacaaaagtttatttgtttctcatttctttttcagaaaataaaggatcgctgttgttcccaacaggtttgtagggaagaaaattggagaaacattattaccttttcttagatgttggcaacggaggcaacaaggactgcaaaagaaaattgtgtgtcccccattcctaaataatcaaaattggcagtagggatggaagagcattggggttttagggctgttagggtttcatcaagccaatgtattccctgccagattttaaggagaaaaaggcgctggaaaattgagtgatgttagccccctttcttatttttcactgctaccaaagactaactctatctctctccccaacccttctctccatctccctcctttagatgtgtttgcacagaagagtgcccagtgaagagacctactccttggatcgctttgcgcaaaatccaccccttttccctcctccctcccttccagcctcc

SEQ ID NO: 42 - RNA, 600 nt, synthetic construct
  source 1..600: mol_type = other RNA
tctctcctgcactgggctgtaagccccaggaagcagaggctgcatctggttttgtgtactagagggtccccccaaatacccggctcttctattaggcaccctcagaatttttgttgagcgaatgaatggggtgcaagaaaggcacggataatataggttatttacggagcatgtaactgtccgcagggcactgctctaagctctttgttcgaatcattttattcaatctccccaaccaccctctgagggaggtggtacgattttcctcatctcacagacaaagagaatgaagctgagggaggttaagtgacttacacaaggtcactccgcctgttagtgcaggggcgggaggcgggatccacacccaggtccctctgacaccaaagtggcaagggggtgggaggggagtccaggttgggacggggtcgcactcgagccggcggagcatccctagggagggggcgggaggcctcccctgcccagctccgagccggtggtgcagcgtccgcccccggtcgcgggcgcagactggcggccgcctccgggccacgtggtgcgcgcggcgggcgcgtccgaggagcctgcggctgctcctggctc

SEQ ID NO: 43 - RNA, 600 nt, synthetic construct
  source 1..600: mol_type = other RNA
ccagatccagcggggtgggggcgggggcggacagggtgtcccgccccggcccctcctcaccgggctgagagggggagggagacgcggaaacctgggttcttccggcccccacctttgagcaatcacttccccaggctttgagctccagaaaaaggggaacccggctgcggcgccccctcccccacgcgcggggggcgggctccacttccactgcggcccagggtccacgtggacctggcggcgggagcccttggggttcgagtcccgtgcgccggctcccgaagctcccgcccagcacggtccccgggcccgggccgggaggggcagggccgctgtccccggcgctgcgcgcgcgcactcaccagccgcgctcccgagccactcgcgccgccgccggcccgcgcgctccaaggtccggcccgacagtcggggagggggcgcgggggcgcagtgcgcaggcgcctcggcggcacttccccaaagccaggggccgggacttcctcgcgccggcggtcgccgggcccgccccgcccgccgcgccccgccccgcgctcggccggctccgcaccccacccgccccgcccgcgcgtcggcccccac

SEQ ID NO: 44 - RNA, 600 nt, synthetic construct
  source 1..600: mol_type = other RNA
gggctctgcgcgcccgccccagtccctcgccccattgactcagtggcttctccgggcgctgcagcctccgcggggggcttcgaagggccgaggggctccggcagagagggagtggagagggagacgcgccgggaccgacgaacaatcctgcccctgcggcaaaggtctctacccggcgctggcacctcgcaggcccctcgaggagcacgcagggcaagcggcccaagagcgggggaaccgggaagtgtgtggggctccagacggagtaggaagctttgcccaaggccaggctgcaatcaggcagccgcaacagccgggcgcggagcttcccacctgctgctgtcccagctgggccgcaacttcctcctccccggcccgggcccgactccccggccgggctccgagggtggagggggacgaggcggcggcaggttccctccgctggcaacgcctcgcagcatcctcccctccccgccgcggttcccggggccggccgcgcggccaggcgcgctgcgattggccggcagcggccgggggcggggccaggagagccggtgtcgcacggaccgcctcaaaagagcccaggatattgcagagcgc

SEQ ID NO: 45 - RNA, 600 nt, synthetic construct
  source 1..600: mol_type = other RNA
ggtggggtggaaagcgctcccaacctgagaaagtgcgaaagactctctaaatccagtagccaatttcctacctgccagaactctttcctaccatccgtcaccattcgtgactctgcaagacacggggacttagacatatgtgtgggagtgtgtgtgtgagggagagaggcgagacgagtgctctccccacacgtgtaaccctgcatctcccagtttcagagcttgcgttcattcatatgcaggcagtggtttaatatttgatcaaaggtagaatagttgcactaaatagttgtatttttaatgggctcaccttaaaatcgggtgttcataaattgcaagtgtgaaaagactctaagtgcagtccgtatgtctctcaccctttctacccttccctcccccattgccgctccccccaaaaagagaagcttgcagcagattgtagaaggatttgagcctgcagctagagagaaggggattagggccagagtggtgcaagttaaattgtgctgcatataaaaaatgggcggattggtctccagatccagaggctggtaccaccttcctttctaaaataaaatctctctggcatgaagtcaccgc

SEQ ID NO: 46 - RNA, 600 nt, synthetic construct
  source 1..600: mol_type = other RNA
gaacctctttacctcttagcagccacgtcgctccacagtagggtgatgttgggggacgggcggcagggcgcggccccagggatctagggcatcaccgccacactacattcccggctttacaccaacacccaacagcagctctgtcaggaaccttggggcctctcgggagccccagcaagcggcctcggggagcagcccgaggctgcgcgtgggctccgctcctccggcgaggtgtgggcgaggggagcggcgctccgagcgcacccaggcgcccgacgccgcccgggtctgcgccgctgctagtgccaggcgggcgacggtcagttaccagggatcgagggatcgaggcaggggagtgtgtgtgtgtgggggggggggaggggggggagggggggccctgccttcccgggaacctccttagccctcctacccggcctgactcctcctcctccaggcgcggggctcgtgcccgccaccgccggcgcgcaccgcgcctccgcccgcgtccccccaatttccccccccggccccagctcctgtcatcgttttccccctcctcctcttcctcctcctcctcttcctcctcctccgcccatcacc

SEQ ID NO: 47 - RNA, 21 nt, synthetic construct
  source 1..21: mol_type = other RNA
gtgcgaatacgcccacgcgat

SEQ ID NO: 48 - RNA, 7997 nt, synthetic construct
  source 1..7997: mol_type = other RNA
cctgcaggcagctgcgcgctcgctcgctcactgaggccgcccgggcgtcgggcgacctttggtcgcccggcctcagtgagcgagcgagcgcgcagagagggagtggccaactccatcactaggggttcctgcggcctctagactcgaggcgttgacattgattattgactagttattaatagtaatcaattacggggtcattagttcatagcccatatatggagttccgcgttacataacttacggtaaatggcccgcctggctgaccgcccaacgacccccgcccattgacgtcaataatgacgtatgttcccatagtaacgccaatagggactttccattgacgtcaatgggtggagtatttacggtaaactgcccacttggcagtacatcaagtgtatcatatgccaagtacgccccctattgacgtcaatgacggtaaatggcccgcctggcattatgcccagtacatgaccttatgggactttcctacttggcagtacatctacgtattagtcatcgctattaccatggtgatgcggttttggcagtacatcaatgggcgtggatagcggtttgactcacggggatttccaagtctccaccccattgacgtcaatgggagtttgttttggcaccaaaatcaacgggactttccaaaatgtcgtaacaactccgccccattgacgcaaatgggcggtaggcgtgtacggtgggaggtctatataagcagagctctctggctaactaccggtgccaccatggccccaaagaagaagcggaaggtcggtatccacggagtcccagcagccaagcggaactacatcctgggcctggccatcggcatcaccagcgtgggctacggcatcatcgactacgagacacgggacgtgatcgatgccggcgtgcggctgttcaaagaggccaacgtggaaaacaacgagggcaggcggagcaagagaggcgccagaaggctgaagcggcggaggcggcatagaatccagagagtgaagaagctgctgttcgactacaacctgctgaccgaccacagcgagctgagcggcatcaacccctacgaggccagagtgaagggcctgagccagaagctgagcgaggaagagttctctgccgccctgctgcacctggccaagagaagaggcgtgcacaacgtgaacgaggtggaagaggacaccggcaacgagctgtccaccaaagagcagatcagccggaacagcaaggccctggaagagaaatacgtggccgaactgcagctggaacggctgaagaaagacggcgaagtgcggggcagcatcaacagattcaagaccagcgactacgtgaaagaagccaaacagctgctgaaggtgcagaaggcctaccaccagctggaccagagcttcatcgacacctacatcgacctgctggaaacccggcggacctactatgagggacctggcgagggcagccccttcggctggaaggacatcaaagaatggtacgagatgctgatgggccactgcacctacttccccgaggaactgcggagcgtgaagtacgcctacaacgccgacctgtacaacgccctgaacgacctgaacaatctcgtgatcaccagggacgagaacgagaagctggaatattacgagaagttccagatcatcgagaacgtgttcaagcagaagaagaagcccaccctgaagcagatcgccaaagaaatcctcgtgaacgaagaggatattaagggctacagagtgaccagcaccggcaagcccgagttcaccaacctgaaggtgtaccacgacatcaaggacattaccgcccggaaagagattattgagaacgccgagctgctggatcagattgccaagatcctgaccatctaccagagcagcgaggacatccaggaagaactgaccaatctgaactccgagctgacccaggaagagatcgagcagatctctaatctgaagggctataccggcacccacaacctgagcctgaaggccatcaacctgatcctggacgagctgtggcacaccaacgacaaccagatcgctatcttcaaccggctgaagctggtgcccaagaaggtggacctgtcccagcagaaagagatccccaccaccctggtggacgacttcatcctgagccccgtcgtgaagagaagcttcatccagagcatcaaagtgatcaacgccatcatcaagaagtacggcctgcccaacgacatcattatcgagctggcccgcgagaagaactccaaggacgcccagaaaatgatcaacgagatgcagaagcggaaccggcagaccaacgagcggatcgaggaaatcatccggaccaccggcaaagagaacgccaagtacctgatcgagaagatcaagctgcacgacatgcaggaaggcaagtgcctgtacagcctggaagccatccctctggaagatctgctgaacaaccccttcaactatgaggtggaccacatcatccccagaagcgtgtccttcgacaacagcttcaacaacaaggtgctcgtgaagcaggaagaagccagcaagaagggcaaccggaccccattccagtacctgagcagcagcgacagcaagatcagctacgaaaccttcaagaagcacatcctgaatctggccaagggcaagggcagaatcagcaagaccaagaaagagtatctgctggaagaacgggacatcaacaggttctccgtgcagaaagacttcatcaaccggaacctggtggataccagatacgccaccagaggcctgatgaacctgctgcggagctacttcagagtgaacaacctggacgtgaaagtgaagtccatcaatggcggcttcaccagctttctgcggcggaagtggaagtttaagaaagagcggaacaaggggtacaagcaccacgccgaggacgccctgatcattgccaacgccgatttcatcttcaaagagtggaagaaactggacaaggccaaaaaagtgatggaaaaccagatgttcgaggaaaagcaggccgagagcatgcccgagatcgaaaccgagcaggagtacaaagagatcttcatcaccccccaccagatcaagcacattaaggacttcaaggactacaagtacagccaccgggtggacaagaagcctaatagagagctgattaacgacaccctgtactccacccggaaggacgacaagggcaacaccctgatcgtgaacaatctgaacggcctgtacgacaaggacaatgacaagctgaaaaagctgatcaacaagagccccgaaaagctgctgatgtaccaccacgacccccagacctaccagaaactgaagctgattatggaacagtacggcgacgagaagaatcccctgtacaagtactacgaggaaaccgggaactacctgaccaagtactccaaaaaggacaacggccccgtgatcaagaagattaagtattacggcaacaaactgaacgcccatctggacatcaccgacgactaccccaacagcagaaacaaggtcgtgaagctgtccctgaagccctacagattcgacgtgtacctggacaatggcgtgtacaagttcgtgaccgtgaagaatctggatgtgatcaaaaaagaaaactactacgaagtgaatagcaagtgctatgaggaagctaagaagctgaagaagatcagcaaccaggccgagtttatcgcctccttctacaacaacgatctgatcaagatcaacggcgagctgtatagagtgatcggcgtgaacaacgacctgctgaaccggatcgaagtgaacatgatcgacatcacctaccgcgagtacctggaaaacatgaacgacaagaggccccccaggatcattaagacaatcgcctccaagacccagagcattaagaagtacagcacagacattctgggcaacctgtatgaagtgaaatctaagaagcaccctcagatcatcaaaaagggcaaaaggccggcggccacgaaaaaggccggccaggcaaaaaagaaaaagggatccggacgggctgacgcattggacgattttgatctggatatgctgggaagtgacgccctcgatgattttgaccttgacatgcttggttcggatgcccttgatgactttgacctcgacatgctcggcagtgacgcccttgatgatttcgacctggacatgctgattaactgtacaggcagtggagagggcagaggaagtctgctaacatgcggtgacgtcgaggagaatcctggcccaatggccaagcctttgtctcaagaagaatccaccctcattgaaagagcaacggctacaatcaacagcatccccatctctgaagactacagcgtcgccagcgcagctctctctagcgacggccgcatcttcactggtgtcaatgtatatcattttactgggggaccttgtgcagaactcgtggtgctgggcactgctgctgctgcggcagctggcaacctgacttgtatcgtcgcgatcggaaatgagaacaggggcatcttgagcccctgcggacggtgccgacaggtgcttctcgatctgcatcctgggatcaaagccatagtgaaggacagtgatggacagccgacggcagttgggattcgtgaattgctgccctctggttatgtgtgggagggctaagaattcctagagctcgctgatcagcctcgactgtgccttctagttgccagccatctgttgtttgcccctcccccgtgccttccttgaccctggaaggtgccactcccactgtcctttcctaataaaatgaggaaattgcatcgcattgtctgagtaggtgtcattctattctggggggtggggtggggcaggacagcaagggggaggattgggaagagaatagcaggcatgctggggaggtaccgagggcctatttcccatgattccttcatatttgcatatacgatacaaggctgttagagagataattggaattaatttgactgtaaacacaaagatattagtacaaaatacgtgacgtagaaagtaataatttcttgggtagtttgcagttttaaaattatgttttaaaatggactatcatatgcttaccgtaacttgaaagtatttcgatttcttggctttatatatcttgtggaaaggacgaaacaccgtgcgaatacgcccacgcgatgtttttagtactctggaaacagaatctactaaaacaaggcaaaatgccgtgtttatctcgtcaacttgttggcgagatttttgcggccgcaggaacccctagtgatggagttggccactccctctctgcgcgctcgctcgctcactgaggccgggcgaccaaaggtcgcccgacgcccgggctttgcccgggcggcctcagtgagcgagcgagcgcgcagctgcctgcaggggcgcctgatgcggtattttctccttacgcatctgtgcggtatttcacaccgcatacgtcaaagcaaccatagtacgcgccctgtagcggcgcattaagcgcggcgggtgtggtggttacgcgcagcgtgaccgctacacttgccagcgccttagcgcccgctcctttcgctttcttcccttcctttctcgccacgttcgccggctttccccgtcaagctctaaatcgggggctccctttagggttccgatttagtgctttacggcacctcgaccccaaaaaacttgatttgggtgatggttcacgtagtgggccatcgccctgatagacggtttttcgccctttgacgttggagtccacgttctttaatagtggactcttgttccaaactggaacaacactcaactctatctcgggctattcttttgatttataagggattttgccgatttcggtctattggttaaaaaatgagctgatttaacaaaaatttaacgcgaattttaacaaaatattaacgtttacaattttatggtgcactctcagtacaatctgctctgatgccgcatagttaagccagccccgacacccgccaacacccgctgacgcgccctgacgggcttgtctgctcccggcatccgcttacagacaagctgtgaccgtctccgggagctgcatgtgtcagaggttttcaccgtcatcaccgaaacgcgcgagacgaaagggcctcgtgatacgcctatttttataggttaatgtcatgataataatggtttcttagacgtcaggtggcacttttcggggaaatgtgcgcggaacccctatttgtttatttttctaaatacattcaaatatgtatccgctcatgagacaataaccctgataaatgcttcaataatattgaaaaaggaagagtatgagtattcaacatttccgtgtcgcccttattcccttttttgcggcattttgccttcctgtttttgctcacccagaaacgctggtgaaagtaaaagatgctgaagatcagttgggtgcacgagtgggttacatcgaactggatctcaacagcggtaagatccttgagagttttcgccccgaagaacgttttccaatgatgagcacttttaaagttctgctatgtggcgcggtattatcccgtattgacgccgggcaagagcaactcggtcgccgcatacactattctcagaatgacttggttgagtactcaccagtcacagaaaagcatcttacggatggcatgacagtaagagaattatgcagtgctgccataaccatgagtgataacactgcggccaacttacttctgacaacgatcggaggaccgaaggagctaaccgcttttttgcacaacatgggggatcatgtaactcgccttgatcgttgggaaccggagctgaatgaagccataccaaacgacgagcgtgacaccacgatgcctgtagcaatggcaacaacgttgcgcaaactattaactggcgaactacttactctagcttcccggcaacaattaatagactggatggaggcggataaagttgcaggaccacttctgcgctcggcccttccggctggctggtttattgctgataaatctggagccggtgagcgtggaagccgcggtatcattgcagcactggggccagatggtaagccctcccgtatcgtagttatctacacgacggggagtcaggcaactatggatgaacgaaatagacagatcgctgagataggtgcctcactgattaagcattggtaactgtcagaccaagtttactcatatatactttagattgatttaaaacttcatttttaatttaaaaggatctaggtgaagatcctttttgataatctcatgaccaaaatcccttaacgtgagttttcgttccactgagcgtcagaccccgtagaaaagatcaaaggatcttcttgagatcctttttttctgcgcgtaatctgctgcttgcaaacaaaaaaaccaccgctaccagcggtggtttgtttgccggatcaagagctaccaactctttttccgaaggtaactggcttcagcagagcgcagataccaaatactgttcttctagtgtagccgtagttaggccaccacttcaagaactctgtagcaccgcctacatacctcgctctgctaatcctgttaccagtggctgctgccagtggcgataagtcgtgtcttaccgggttggactcaagacgatagttaccggataaggcgcagcggtcgggctgaacggggggttcgtgcacacagcccagcttggagcgaacgacctacaccgaactgagatacctacagcgtgagctatgagaaagcgccacgcttcccgaagggagaaaggcggacaggtatccggtaagcggcagggtcggaacaggagagcgcacgagggagcttccagggggaaacgcctggtatctttatagtcctgtcgggtttcgccacctctgacttgagcgtcgatttttgtgatgctcgtcaggggggcggagcctatggaaaaacgccagcaacgcggcctttttacggttcctggccttttgctggccttttgctcacatgt

SEQ ID NO: 49 - RNA, 21 nt, synthetic construct
  source 1..21: mol_type = other RNA
tactagccacaatagagccag

SEQ ID NO: 50 - RNA, 21 nt, synthetic construct
  source 1..21: mol_type = other RNA
ccttactagccacaatagagc

SEQ ID NO: 51 - RNA, 21 nt, synthetic construct
  source 1..21: mol_type = other RNA
tgtgatcattgactttgatta

SEQ ID NO: 52 - RNA, 21 nt, synthetic construct
  source 1..21: mol_type = other RNA
aggggcctctagaaggatccc

SEQ ID NO: 53 - RNA, 21 nt, synthetic construct
  source 1..21: mol_type = other RNA
ttgattaaagaggttggtggt

SEQ ID NO: 54 - RNA, 21 nt, synthetic construct
  source 1..21: mol_type = other RNA
gaatttaactagctgtatccc

SEQ ID NO: 55 - RNA, 21 nt, synthetic construct
  source 1..21: mol_type = other RNA
tactagccacaatagagccag

SEQ ID NO: 56 - RNA, 7997 nt, synthetic construct
  source 1..7997: mol_type = other RNA
cctgcaggcagctgcgcgctcgctcgctcactgaggccgcccgggcgtcgggcgacctttggtcgcccggcctcagtgagcgagcgagcgcgcagagagggagtggccaactccatcactaggggttcctgcggcctctagactcgaggcgttgacattgattattgactagttattaatagtaatcaattacggggtcattagttcatagcccatatatggagttccgcgttacataacttacggtaaatggcccgcctggctgaccgcccaacgacccccgcccattgacgtcaataatgacgtatgttcccatagtaacgccaatagggactttccattgacgtcaatgggtggagtatttacggtaaactgcccacttggcagtacatcaagtgtatcatatgccaagtacgccccctattgacgtcaatgacggtaaatggcccgcctggcattatgcccagtacatgaccttatgggactttcctacttggcagtacatctacgtattagtcatcgctattaccatggtgatgcggttttggcagtacatcaatgggcgtggatagcggtttgactcacggggatttccaagtctccaccccattgacgtcaatgggagtttgttttggcaccaaaatcaacgggactttccaaaatgtcgtaacaactccgccccattgacgcaaatgggcggtaggcgtgtacggtgggaggtctatataagcagagctctctggctaactaccggtgccaccatggccccaaagaagaagcggaaggtcggtatccacggagtcccagcagccaagcggaactacatcctgggcctggccatcggcatcaccagcgtgggctacggcatcatcgactacgagacacgggacgtgatcgatgccggcgtgcggctgttcaaagaggccaacgtggaaaacaacgagggcaggcggagcaagagaggcgccagaaggctgaagcggcggaggcggcatagaatccagagagtgaagaagctgctgttcgactacaacctgctgaccgaccacagcgagctgagcggcatcaacccctacgaggccagagtgaagggcctgagccagaagctgagcgaggaagagttctctgccgccctgctgcacctggccaagagaagaggcgtgcacaacgtgaacgaggtggaagaggacaccggcaacgagctgtccaccaaagagcagatcagccggaacagcaaggccctggaagagaaatacgtggccgaactgcagctggaacggctgaagaaagacggcgaagtgcggggcagcatcaacagattcaagaccagcgactacgtgaaagaagccaaacagctgctgaaggtgcagaaggcctaccaccagctggaccagagcttcatcgacacctacatcgacctgctggaaacccggcggacctactatgagggacctggcgagggcagccccttcggctggaaggacatcaaagaatggtacgagatgctgatgggccactgcacctacttccccgaggaactgcggagcgtgaagtacgcctacaacgccgacctgtacaacgccctgaacgacctgaacaatctcgtgatcaccagggacgagaacgagaagctggaatattacgagaagttccagatcatcgagaacgtgttcaagcagaagaagaagcccaccctgaagcagatcgccaaagaaatcctcgtgaacgaagaggatattaagggctacagagtgaccagcaccggcaagcccgagttcaccaacctgaaggtgtaccacgacatcaaggacattaccgcccggaaagagattattgagaacgccgagctgctggatcagattgccaagatcctgaccatctaccagagcagcgaggacatccaggaagaactgaccaatctgaactccgagctgacccaggaagagatcgagcagatctctaatctgaagggctataccggcacccacaacctgagcctgaaggccatcaacctgatcctggacgagctgtggcacaccaacgacaaccagatcgctatcttcaaccggctgaagctggtgcccaagaaggtggacctgtcccagcagaaagagatccccaccaccctggtggacgacttcatcctgagccccgtcgtgaagagaagcttcatccagagcatcaaagtgatcaacgccatcatcaagaagtacggcctgcccaacgacatcattatcgagctggcccgcgagaagaactccaaggacgcccagaaaatgatcaacgagatgcagaagcggaaccggcagaccaacgagcggatcgaggaaatcatccggaccaccggcaaagagaacgccaagtacctgatcgagaagatcaagctgcacgacatgcaggaaggcaagtgcctgtacagcctggaagccatccctctggaagatctgctgaacaaccccttcaactatgaggtggaccacatcatccccagaagcgtgtccttcgacaacagcttcaacaacaaggtgctcgtgaagcaggaagaagccagcaagaagggcaaccggaccccattccagtacctgagcagcagcgacagcaagatcagctacgaaaccttcaagaagcacatcctgaatctggccaagggcaagggcagaatcagcaagaccaagaaagagtatctgctggaagaacgggacatcaacaggttctccgtgcagaaagacttcatcaaccggaacctggtggataccagatacgccaccagaggcctgatgaacctgctgcggagctacttcagagtgaacaacctggacgtgaaagtgaagtccatcaatggcggcttcaccagctttctgcggcggaagtggaagtttaagaaagagcggaacaaggggtacaagcaccacgccgaggacgccctgatcattgccaacgccgatttcatcttcaaagagtggaagaaactggacaaggccaaaaaagtgatggaaaaccagatgttcgaggaaaagcaggccgagagcatgcccgagatcgaaaccgagcaggagtacaaagagatcttcatcaccccccaccagatcaagcacattaaggacttcaaggactacaagtacagccaccgggtggacaagaagcctaatagagagctgattaacgacaccctgtactccacccggaaggacgacaagggcaacaccctgatcgtgaacaatctgaacggcctgtacgacaaggacaatgacaagctgaaaaagctgatcaacaagagccccgaaaagctgctgatgtaccaccacgacccccagacctaccagaaactgaagctgattatggaacagtacggcgacgagaagaatcccctgtacaagtactacgaggaaaccgggaactacctgaccaagtactccaaaaaggacaacggccccgtgatcaagaagattaagtattacggcaacaaactgaacgcccatctggacatcaccgacgactaccccaacagcagaaacaaggtcgtgaagctgtccctgaagccctacagattcgacgtgtacctggacaatggcgtgtacaagttcgtgaccgtgaagaatctggatgtgatcaaaaaagaaaactactacgaagtgaatagcaagtgctatgaggaagctaagaagctgaagaagatcagcaaccaggccgagtttatcgcctccttctacaacaacgatctgatcaagatcaacggcgagctgtatagagtgatcggcgtgaacaacgacctgctgaaccggatcgaagtgaacatgatcgacatcacctaccgcgagtacctggaaaacatgaacgacaagaggccccccaggatcattaagacaatcgcctccaagacccagagcattaagaagtacagcacagacattctgggcaacctgtatgaagtgaaatctaagaagcaccctcagatcatcaaaaagggcaaaaggccggcggccacgaaaaaggccggccaggcaaaaaagaaaaagggatccggacgggctgacgcattggacgattttgatctggatatgctgggaagtgacgccctcgatgattttgaccttgacatgcttggttcggatgcccttgatgactttgacctcgacatgctcggcagtgacgcccttgatgatttcgacctggacatgctgattaactgtacaggcagtggagagggcagaggaagtctgctaacatgcggtgacgtcgaggagaatcctggcccaatggccaagcctttgtctcaagaagaatccaccctcattgaaagagcaacggctacaatcaacagcatccccatctctgaagactacagcgtcgccagcgcagctctctctagcgacggccgcatcttcactggtgtcaatgtatatcattttactgggggaccttgtgcagaactcgtggtgctgggcactgctgctgctgcggcagctggcaacctgacttgtatcgtcgcgatcggaaatgagaacaggggcatcttgagcccctgcggacggtgccgacaggtgcttctcgatctgcatcctgggatcaaagccatagtgaaggacagtgatggacagccgacggcagttgggattcgtgaattgctgccctctggttatgtgtgggagggctaagaattcctagagctcgctgatcagcctcgactgtgccttctagttgccagccatctgttgtttgcccctcccccgtgccttccttgaccctggaaggtgccactcccactgtcctttcctaataaaatgaggaaattgcatcgcattgtctgagtaggtgtcattctattctggggggtggggtggggcaggacagcaagggggaggattgggaagagaatagcaggcatgctggggaggtaccgagggcctatttcccatgattccttcatatttgcatatacgatacaaggctgttagagagataattggaattaatttgactgtaaacacaaagatattagtacaaaatacgtgacgtagaaagtaataatttcttgggtagtttgcagttttaaaattatgttttaaaatggactatcatatgcttaccgtaacttgaaagtatttcgatttcttggctttatatatcttgtggaaaggacgaaacaccgtactagccacaatagagccaggttttagtactctggaaacagaatctactaaaacaaggcaaaatgccgtgtttatctcgtcaacttgttggcgagatttttgcggccgcaggaacccctagtgatggagttggccactccctctctgcgcgctcgctcgctcactgaggccgggcgaccaaaggtcgcccgacgcccgggctttgcccgggcggcctcagtgagcgagcgagcgcgcagctgcctgcaggggcgcctgatgcggtattttctccttacgcatctgtgcggtatttcacaccgcatacgtcaaagcaaccatagtacgcgccctgtagcggcgcattaagcgcggcgggtgtggtggttacgcgcagcgtgaccgctacacttgccagcgccttagcgcccgctcctttcgctttcttcccttcctttctcgccacgttcgccggctttccccgtcaagctctaaatcgggggctccctttagggttccgatttagtgctttacggcacctcgaccccaaaaaacttgatttgggtgatggttcacgtagtgggccatcgccctgatagacggtttttcgccctttgacgttggagtccacgttctttaatagtggactcttgttccaaactggaacaacactcaactctatctcgggctattcttttgatttataagggattttgccgatttcggtctattggttaaaaaatgagctgatttaacaaaaatttaacgcgaattttaacaaaatattaacgtttacaattttatggtgcactctcagtacaatctgctctgatgccgcatagttaagccagccccgacacccgccaacacccgctgacgcgccctgacgggcttgtctgctcccggcatccgcttacagacaagctgtgaccgtctccgggagctgcatgtgtcagaggttttcaccgtcatcaccgaaacgcgcgagacgaaagggcctcgtgatacgcctatttttataggttaatgtcatgataataatggtttcttagacgtcaggtggcacttttcggggaaatgtgcgcggaacccctatttgtttatttttctaaatacattcaaatatgtatccgctcatgagacaataaccctgataaatgcttcaataatattgaaaaaggaagagtatgagtattcaacatttccgtgtcgcccttattcccttttttgcggcattttgccttcctgtttttgctcacccagaaacgctggtgaaagtaaaagatgctgaagatcagttgggtgcacgagtgggttacatcgaactggatctcaacagcggtaagatccttgagagttttcgccccgaagaacgttttccaatgatgagcacttttaaagttctgctatgtggcgcggtattatcccgtattgacgccgggcaagagcaactcggtcgccgcatacactattctcagaatgacttggttgagtactcaccagtcacagaaaagcatcttacggatggcatgacagtaagagaattatgcagtgctgccataaccatgagtgataacactgcggccaacttacttctgacaacgatcggaggaccgaaggagctaaccgcttttttgcacaacatgggggatcatgtaactcgccttgatcgttgggaaccggagctgaatgaagccataccaaacgacgagcgtgacaccacgatgcctgtagcaatggcaacaacgttgcgcaaactattaactggcgaactacttactctagcttcccggcaacaattaatagactggatggaggcggataaagttgcaggaccacttctgcgctcggcccttccggctggctggtttattgctgataaatctggagccggtgagcgtggaagccgcggtatcattgcagcactggggccagatggtaagccctcccgtatcgtagttatctacacgacggggagtcaggcaactatggatgaacgaaatagacagatcgctgagataggtgcctcactgattaagcattggtaactgtcagaccaagtttactcatatatactttagattgatttaaaacttcatttttaatttaaaaggatctaggtgaagatcctttttgataatctcatgaccaaaatcccttaacgtgagttttcgttccactgagcgtcagaccccgtagaaaagatcaaaggatcttcttgagatcctttttttctgcgcgtaatctgctgcttgcaaacaaaaaaaccaccgctaccagcggtggtttgtttgccggatcaagagctaccaactctttttccgaaggtaactggcttcagcagagcgcagataccaaatactgttcttctagtgtagccgtagttaggccaccacttcaagaactctgtagcaccgcctacatacctcgctctgctaatcctgttaccagtggctgctgccagtggcgataagtcgtgtcttaccgggttggactcaagacgatagttaccggataaggcgcagcggtcgggctgaacggggggttcgtgcacacagcccagcttggagcgaacgacctacaccgaactgagatacctacagcgtgagctatgagaaagcgccacgcttcccgaagggagaaaggcggacaggtatccggtaagcggcagggtcggaacaggagagcgcacgagggagcttccagggggaaacgcctggtatctttatagtcctgtcgggtttcgccacctctgacttgagcgtcgatttttgtgatgctcgtcaggggggcggagcctatggaaaaacgccagcaacgcggcctttttacggttcctggccttttgctggccttttgctcacatgt

SEQ ID NO: 57 - RNA, 7997 nt, synthetic construct
  source 1..7997: mol_type = other RNA
cctgcaggcagctgcgcgctcgctcgctcactgaggccgcccgggcgtcgggcgacctttggtcgcccggcctcagtgagcgagcgagcgcgcagagagggagtggccaactccatcactaggggttcctgcggcctctagactcgaggcgttgacattgattattgactagttattaatagtaatcaattacggggtcattagttcatagcccatatatggagttccgcgttacataacttacggtaaatggcccgcctggctgaccgcccaacgacccccgcccattgacgtcaataatgacgtatgttcccatagtaacgccaatagggactttccattgacgtcaatgggtggagtatttacggtaaactgcccacttggcagtacatcaagtgtatcatatgccaagtacgccccctattgacgtcaatgacggtaaatggcccgcctggcattatgcccagtacatgaccttatgggactttcctacttggcagtacatctacgtattagtcatcgctattaccatggtgatgcggttttggcagtacatcaatgggcgtggatagcggtttgactcacggggatttccaagtctccaccccattgacgtcaatgggagtttgttttggcaccaaaatcaacgggactttccaaaatgtcgtaacaactccgccccattgacgcaaatgggcggtaggcgtgtacggtgggaggtctatataagcagagctctctggctaactaccggtgccaccatggccccaaagaagaagcggaaggtcggtatccacggagtcccagcagccaagcggaactacatcctgggcctggccatcggcatcaccagcgtgggctacggcatcatcgactacgagacacgggacgtgatcgatgccggcgtgcggctgttcaaagaggccaacgtggaaaacaacgagggcaggcggagcaagagaggcgccagaaggctgaagcggcggaggcggcatagaatccagagagtgaagaagctgctgttcgactacaacctgctgaccgaccacagcgagctgagcggcatcaacccctacgaggccagagtgaagggcctgagccagaagctgagcgaggaagagttctctgccgccctgctgcacctggccaagagaagaggcgtgcacaacgtgaacgaggtggaagaggacaccggcaacgagctgtccaccaaagagcagatcagccggaacagcaaggccctggaagagaaatacgtggccgaactgcagctggaacggctgaagaaagacggcgaagtgcggggcagcatcaacagattcaagaccagcgactacgtgaaagaagccaaacagctgctgaaggtgcagaaggcctaccaccagctggaccagagcttcatcgacacctacatcgacctgctggaaacccggcggacctactatgagggacctggcgagggcagccccttcggctggaaggacatcaaagaatggtacgagatgctgatgggccactgcacctacttccccgaggaactgcggagcgtgaagtacgcctacaacgccgacctgtacaacgccctgaacgacctgaacaatctcgtgatcaccagggacgagaacgagaagctggaatattacgagaagttccagatcatcgagaacgtgttcaagcagaagaagaagcccaccctgaagcagatcgccaaagaaatcctcgtgaacgaagaggatattaagggctacagagtgaccagcaccggcaagcccgagttcaccaacctgaaggtgtaccacgacatcaaggacattaccgcccggaaagagattattgagaacgccgagctgctggatcagattgccaagatcctgaccatctaccagagcagcgaggacatccaggaagaactgaccaatctgaactccgagctgacccaggaagagatcgagcagatctctaatctgaagggctataccggcacccacaacctgagcctgaaggccatcaacctgatcctggacgagctgtggcacaccaacgacaaccagatcgctatcttcaaccggctgaagctggtgcccaagaaggtggacctgtcccagcagaaagagatccccaccaccctggtggacgacttcatcctgagccccgtcgtgaagagaagcttcatccagagcatcaaagtgatcaacgccatcatcaagaagtacggcctgcccaacgacatcattatcgagctggcccgcgagaagaactccaaggacgcccagaaaatgatcaacgagatgcagaagcggaaccggcagaccaacgagcggatcgaggaaatcatccggaccaccggcaaagagaacgccaagtacctgatcgagaagatcaagctgcacgacatgcaggaaggcaagtgcctgtacagcctggaagccatccctctggaagatctgctgaacaaccccttcaactatgaggtggaccacatcatccccagaagcgtgtccttcgacaacagcttcaacaacaaggtgctcgtgaagcaggaagaagccagcaagaagggcaaccggaccccattccagtacctgagcagcagcgacagcaagatcagctacgaaaccttcaagaagcacatcctgaatctggccaagggcaagggcagaatcagcaagaccaagaaagagtatctgctggaagaacgggacatcaacaggttctccgtgcagaaagacttcatcaaccggaacctggtggataccagatacgccaccagaggcctgatgaacctgctgcggagctacttcagagtgaacaacctggacgtgaaagtgaagtccatcaatggcggcttcaccagctttctgcggcggaagtggaagtttaagaaagagcggaacaaggggtacaagcaccacgccgaggacgccctgatcattgccaacgccgatttcatcttcaaagagtggaagaaactggacaaggccaaaaaagtgatggaaaaccagatgttcgaggaaaagcaggccgagagcatgcccgagatcgaaaccgagcaggagtacaaagagatcttcatcaccccccaccagatcaagcacattaaggacttcaaggactacaagtacagccaccgggtggacaagaagcctaatagagagctgattaacgacaccctgtactccacccggaaggacgacaagggcaacaccctgatcgtgaacaatctgaacggcctgtacgacaaggacaatgacaagctgaaaaagctgatcaacaagagccccgaaaagctgctgatgtaccaccacgacccccagacctaccagaaactgaagctgattatggaacagtacggcgacgagaagaatcccctgtacaagtactacgaggaaaccgggaactacctgaccaagtactccaaaaaggacaacggccccgtgatcaagaagattaagtattacggcaacaaactgaacgcccatctggacatcaccgacgactaccccaacagcagaaacaaggtcgtgaagctgtccctgaagccctacagattcgacgtgtacctggacaatggcgtgtacaagttcgtgaccgtgaagaatctggatgtgatcaaaaaagaaaactactacgaagtgaatagcaagtgctatgaggaagctaagaagctgaagaagatcagcaaccaggccgagtttatcgcctccttctacaacaacgatctgatcaagatcaacggcgagctgtatagagtgatcggcgtgaacaacgacctgctgaaccggatcgaagtgaacatgatcgacatcacctaccgcgagtacctggaaaacatgaacgacaagaggccccccaggatcattaagacaatcgcctccaagacccagagcattaagaagtacagcacagacattctgggcaacctgtatgaagtgaaatctaagaagcaccctcagatcatcaaaaagggcaaaaggccggcggccacgaaaaaggccggccaggcaaaaaagaaaaagggatccggacgggctgacgcattggacgattttgatctggatatgctgggaagtgacgccctcgatgattttgaccttgacatgcttggttcggatgcccttgatgactttgacctcgacatgctcggcagtgacgcccttgatgatttcgacctggacatgctgattaactgtacaggcagtggagagggcagaggaagtctgctaacatgcggtgacgtcgaggagaatcctggcccaatggccaagcctttgtctcaagaagaatccaccctcattgaaagagcaacggctacaatcaacagcatccccatctctgaagactacagcgtcgccagcgcagctctctctagcgacggccgcatcttcactggtgtcaatgtatatcattttactgggggaccttgtgcagaactcgtggtgctgggcactgctgctgctgcggcagctggcaacctgacttgtatcgtcgcgatcggaaatgagaacaggggcatcttgagcccctgcggacggtgccgacaggtgcttctcgatctgcatcctgggatcaaagccatagtgaaggacagtgatggacagccgacggcagttgggattcgtgaattgctgccctctggttatgtgtgggagggctaagaattcctagagctcgctgatcagcctcgactgtgccttctagttgccagccatctgttgtttgcccctcccccgtgccttccttgaccctggaaggtgccactcccactgtcctttcctaataaaatgaggaaattgcatcgcattgtctgagtaggtgtcattctattctggggggtggggtggggcaggacagcaagggggaggattgggaagagaatagcaggcatgctggggaggtaccgagggcctatttcccatgattccttcatatttgcatatacgatacaaggctgttagagagataattggaattaatttgactgtaaacacaaagatattagtacaaaatacgtgacgtagaaagtaataatttcttgggtagtttgcagttttaaaattatgttttaaaatggactatcatatgcttaccgtaacttgaaagtatttcgatttcttggctttatatatcttgtggaaaggacgaaacaccgccttactagccacaatagagcgttttagtactctggaaacagaatctactaaaacaaggcaaaatgccgtgtttatctcgtcaacttgttggcgagatttttgcggccgcaggaacccctagtgatggagttggccactccctctctgcgcgctcgctcgctcactgaggccgggcgaccaaaggtcgcccgacgcccgggctttgcccgggcggcctcagtgagcgagcgagcgcgcagctgcctgcaggggcgcctgatgcggtattttctccttacgcatctgtgcggtatttcacaccgcatacgtcaaagcaaccatagtacgcgccctgtagcggcgcattaagcgcggcgggtgtggtggttacgcgcagcgtgaccgctacacttgccagcgccttagcgcccgctcctttcgctttcttcccttcctttctcgccacgttcgccggctttccccgtcaagctctaaatcgggggctccctttagggttccgatttagtgctttacggcacctcgaccccaaaaaacttgatttgggtgatggttcacgtagtgggccatcgccctgatagacggtttttcgccctttgacgttggagtccacgttctttaatagtggactcttgttccaaactggaacaacactcaactctatctcgggctattcttttgatttataagggattttgccgatttcggtctattggttaaaaaatgagctgatttaacaaaaatttaacgcgaattttaacaaaatattaacgtttacaattttatggtgcactctcagtacaatctgctctgatgccgcatagttaagccagccccgacacccgccaacacccgctgacgcgccctgacgggcttgtctgctcccggcatccgcttacagacaagctgtgaccgtctccgggagctgcatgtgtcagaggttttcaccgtcatcaccgaaacgcgcgagacgaaagggcctcgtgatacgcctatttttataggttaatgtcatgataataatggtttcttagacgtcaggtggcacttttcggggaaatgtgcgcggaacccctatttgtttatttttctaaatacattcaaatatgtatccgctcatgagacaataaccctgataaatgcttcaataatattgaaaaaggaagagtatgagtattcaacatttccgtgtcgcccttattcccttttttgcggcattttgccttcctgtttttgctcacccagaaacgctggtgaaagtaaaagatgctgaagatcagttgggtgcacgagtgggttacatcgaactggatctcaacagcggtaagatccttgagagttttcgccccgaagaacgttttccaatgatgagcacttttaaagttctgctatgtggcgcggtattatcccgtattgacgccgggcaagagcaactcggtcgccgcatacactattctcagaatgacttggttgagtactcaccagtcacagaaaagcatcttacggatggcatgacagtaagagaattatgcagtgctgccataaccatgagtgataacactgcggccaacttacttctgacaacgatcggaggaccgaaggagctaaccgcttttttgcacaacatgggggatcatgtaactcgccttgatcgttgggaaccggagctgaatgaagccataccaaacgacgagcgtgacaccacgatgcctgtagcaatggcaacaacgttgcgcaaactattaactggcgaactacttactctagcttcccggcaacaattaatagactggatggaggcggataaagttgcaggaccacttctgcgctcggcccttccggctggctggtttattgctgataaatctggagccggtgagcgtggaagccgcggtatcattgcagcactggggccagatggtaagccctcccgtatcgtagttatctacacgacggggagtcaggcaactatggatgaacgaaatagacagatcgctgagataggtgcctcactgattaagcattggtaactgtcagaccaagtttactcatatatactttagattgatttaaaacttcatttttaatttaaaaggatctaggtgaagatcctttttgataatctcatgaccaaaatcccttaacgtgagttttcgttccactgagcgtcagaccccgtagaaaagatcaaaggatcttcttgagatcctttttttctgcgcgtaatctgctgcttgcaaacaaaaaaaccaccgctaccagcggtggtttgtttgccggatcaagagctaccaactctttttccgaaggtaactggcttcagcagagcgcagataccaaatactgttcttctagtgtagccgtagttaggccaccacttcaagaactctgtagcaccgcctacatacctcgctctgctaatcctgttaccagtggctgctgccagtggcgataagtcgtgtcttaccgggttggactcaagacgatagttaccggataaggcgcagcggtcgggctgaacggggggttcgtgcacacagcccagcttggagcgaacgacctacaccgaactgagatacctacagcgtgagctatgagaaagcgccacgcttcccgaagggagaaaggcggacaggtatccggtaagcggcagggtcggaacaggagagcgcacgagggagcttccagggggaaacgcctggtatctttatagtcctgtcgggtttcgccacctctgacttgagcgtcgatttttgtgatgctcgtcaggggggcggagcctatggaaaaacgccagcaacgcggcctttttacggttcctggccttttgctggccttttgctcacatgt

SEQ ID NO: 58 - RNA, 7997 nt, synthetic construct
  source 1..7997: mol_type = other RNA
cctgcaggcagctgcgcgctcgctcgctcactgaggccgcccgggcgtcgggcgacctttggtcgcccggcctcagtgagcgagcgagcgcgcagagagggagtggccaactccatcactaggggttcctgcggcctctagactcgaggcgttgacattgattattgactagttattaatagtaatcaattacggggtcattagttcatagcccatatatggagttccgcgttacataacttacggtaaatggcccgcctggctgaccgcccaacgacccccgcccattgacgtcaataatgacgtatgttcccatagtaacgccaatagggactttccattgacgtcaatgggtggagtatttacggtaaactgcccacttggcagtacatcaagtgtatcatatgccaagtacgccccctattgacgtcaatgacggtaaatggcccgcctggcattatgcccagtacatgaccttatgggactttcctacttggcagtacatctacgtattagtcatcgctattaccatggtgatgcggttttggcagtacatcaatgggcgtggatagcggtttgactcacggggatttccaagtctccaccccattgacgtcaatgggagtttgttttggcaccaaaatcaacgggactttccaaaatgtcgtaacaactccgccccattgacgcaaatgggcggtaggcgtgtacggtgggaggtctatataagcagagctctctggctaactaccggtgccaccatggccccaaagaagaagcggaaggtcggtatccacggagtcccagcagccaagcggaactacatcctgggcctggccatcggcatcaccagcgtgggctacggcatcatcgactacgagacacgggacgtgatcgatgccggcgtgcggctgttcaaagaggccaacgtggaaaacaacgagggcaggcggagcaagagaggcgccagaaggctgaagcggcggaggcggcatagaatccagagagtgaagaagctgctgttcgactacaacctgctgaccgaccacagcgagctgagcggcatcaacccctacgaggccagagtgaagggcctgagccagaagctgagcgaggaagagttctctgccgccctgctgcacctggccaagagaagaggcgtgcacaacgtgaacgaggtggaagaggacaccggcaacgagctgtccaccaaagagcagatcagccggaacagcaaggccctggaagagaaatacgtggccgaactgcagctggaacggctgaagaaagacggcgaagtgcggggcagcatcaacagattcaagaccagcgactacgtgaaagaagccaaacagctgctgaaggtgcagaaggcctaccaccagctggaccagagcttcatcgacacctacatcgacctgctggaaacccggcggacctactatgagggacctggcgagggcagccccttcggctggaaggacatcaaagaatggtacgagatgctgatgggccactgcacctacttccccgaggaactgcggagcgtgaagtacgcctacaacgccgacctgtacaacgccctgaacgacctgaacaatctcgtgatcaccagggacgagaacgagaagctggaatattacgagaagttccagatcatcgagaacgtgttcaagcagaagaagaagcccaccctgaagcagatcgccaaagaaatcctcgtgaacgaagaggatattaagggctacagagtgaccagcaccggcaagcccgagttcaccaacctgaaggtgtaccacgacatcaaggacattaccgcccggaaagagattattgagaacgccgagctgctggatcagattgccaagatcctgaccatctaccagagcagcgaggacatccaggaagaactgaccaatctgaactccgagctgacccaggaagagatcgagcagatctctaatctgaagggctataccggcacccacaacctgagcctgaaggccatcaacctgatcctggacgagctgtggcacaccaacgacaaccagatcgctatcttcaaccggctgaagctggtgcccaagaaggtggacctgtcccagcagaaagagatccccaccaccctggtggacgacttcatcctgagccccgtcgtgaagagaagcttcatccagagcatcaaagtgatcaacgccatcatcaagaagtacggcctgcccaacgacatcattatcgagctggcccgcgagaagaactccaaggacgcccagaaaatgatcaacgagatgcagaagcggaaccggcagaccaacgagcggatcgaggaaatcatccggaccaccggcaaagagaacgccaagtacctgatcgagaagatcaagctgcacgacatgcaggaaggcaagtgcctgtacagcctggaagccatccctctggaagatctgctgaacaaccccttcaactatgaggtggaccacatcatccccagaagcgtgtccttcgacaacagcttcaacaacaaggtgctcgtgaagcaggaagaagccagcaagaagggcaaccggaccccattccagtacctgagcagcagcgacagcaagatcagctacgaaaccttcaagaagcacatcctgaatctggccaagggcaagggcagaatcagcaagaccaagaaagagtatctgctggaagaacgggacatcaacaggttctccgtgcagaaagacttcatcaaccggaacctggtggataccagatacgccaccagaggcctgatgaacctgctgcggagctacttcagagtgaacaacctggacgtgaaagtgaagtccatcaatggcggcttcaccagctttctgcggcggaagtggaagtttaagaaagagcggaacaaggggtacaagcaccacgccgaggacgccctgatcattgccaacgccgatttcatcttcaaagagtggaagaaactggacaaggccaaaaaagtgatggaaaaccagatgttcgaggaaaagcaggccgagagcatgcccgagatcgaaaccgagcaggagtacaaagagatcttcatcaccccccaccagatcaagcacattaaggacttcaaggactacaagtacagccaccgggtggacaagaagcctaatagagagctgattaacgacaccctgtactccacccggaaggacgacaagggcaacaccctgatcgtgaacaatctgaacggcctgtacgacaaggacaatgacaagctgaaaaagctgatcaacaagagccccgaaaagctgctgatgtaccaccacgacccccagacctaccagaaactgaagctgattatggaacagtacggcgacgagaagaatcccctgtacaagtactacgaggaaaccgggaactacctgaccaagtactccaaaaaggacaacggccccgtgatcaagaagattaagtattacggcaacaaactgaacgcccatctggacatcaccgacgactaccccaacagcagaaacaaggtcgtgaagctgtccctgaagccctacagattcgacgtgtacctggacaatggcgtgtacaagttcgtgaccgtgaagaatctggatgtgatcaaaaaagaaaactactacgaagtgaatagcaagtgctatgaggaagctaagaagctgaagaagatcagcaaccaggccgagtttatcgcctccttctacaacaacgatctgatcaagatcaacggcgagctgtatagagtgatcggcgtgaacaacgacctgctgaaccggatcgaagtgaacatgatcgacatcacctaccgcgagtacctggaaaacatgaacgacaagaggccccccaggatcattaagacaatcgcctccaagacccagagcattaagaagtacagcacagacattctgggcaacctgtatgaagtgaaatctaagaagcaccctcagatcatcaaaaagggcaaaaggccggcggccacgaaaaaggccggccaggcaaaaaagaaaaagggatccggacgggctgacgcattggacgattttgatctggatatgctgggaagtgacgccctcgatgattttgaccttgacatgcttggttcggatgcccttgatgactttgacctcgacatgctcggcagtgacgcccttgatgatttcgacctggacatgctgattaactgtacaggcagtggagagggcagaggaagtctgctaacatgcggtgacgtcgaggagaatcctggcccaatggccaagcctttgtctcaagaagaatccaccctcattgaaagagcaacggctacaatcaacagcatccccatctctgaagactacagcgtcgccagcgcagctctctctagcgacggccgcatcttcactggtgtcaatgtatatcattttactgggggaccttgtgcagaactcgtggtgctgggcactgctgctgctgcggcagctggcaacctgacttgtatcgtcgcgatcggaaatgagaacaggggcatcttgagcccctgcggacggtgccgacaggtgcttctcgatctgcatcctgggatcaaagccatagtgaaggacagtgatggacagccgacggcagttgggattcgtgaattgctgccctctggttatgtgtgggagggctaagaattcctagagctcgctgatcagcctcgactgtgccttctagttgccagccatctgttgtttgcccctcccccgtgccttccttgaccctggaaggtgccactcccactgtcctttcctaataaaatgaggaaattgcatcgcattgtctgagtaggtgtcattctattctggggggtggggtggggcaggacagcaagggggaggattgggaagagaatagcaggcatgctggggaggtaccgagggcctatttcccatgattccttcatatttgcatatacgatacaaggctgttagagagataattggaattaatttgactgtaaacacaaagatattagtacaaaatacgtgacgtagaaagtaataatttcttgggtagtttgcagttttaaaattatgttttaaaatggactatcatatgcttaccgtaacttgaaagtatttcgatttcttggctttatatatcttgtggaaaggacgaaacaccgtgtgatcattgactttgattagttttagtactctggaaacagaatctactaaaacaaggcaaaatgccgtgtttatctcgtcaacttgttggcgagatttttgcggccgcaggaacccctagtgatggagttggccactccctctctgcgcgctcgctcgctcactgaggccgggcgaccaaaggtcgcccgacgcccgggctttgcccgggcggcctcagtgagcgagcgagcgcgcagctgcctgcaggggcgcctgatgcggtattttctccttacgcatctgtgcggtatttcacaccgcatacgtcaaagcaaccatagtacgcgccctgtagcggcgcattaagcgcggcgggtgtggtggttacgcgcagcgtgaccgctacacttgccagcgccttagcgcccgctcctttcgctttcttcccttcctttctcgccacgttcgccggctttccccgtcaagctctaaatcgggggctccctttagggttccgatttagtgctttacggcacctcgaccccaaaaaacttgatttgggtgatggttcacgtagtgggccatcgccctgatagacggtttttcgccctttgacgttggagtccacgttctttaatagtggactcttgttccaaactggaacaacactcaactctatctcgggctattcttttgatttataagggattttgccgatttcggtctattggttaaaaaatgagctgatttaacaaaaatttaacgcgaattttaacaaaatattaacgtttacaattttatggtgcactctcagtacaatctgctctgatgccgcatagttaagccagccccgacacccgccaacacccgctgacgcgccctgacgggcttgtctgctcccggcatccgcttacagacaagctgtgaccgtctccgggagctgcatgtgtcagaggttttcaccgtcatcaccgaaacgcgcgagacgaaagggcctcgtgatacgcctatttttataggttaatgtcatgataataatggtttcttagacgtcaggtggcacttttcggggaaatgtgcgcggaacccctatttgtttatttttctaaatacattcaaatatgtatccgctcatgagacaataaccctgataaatgcttcaataatattgaaaaaggaagagtatgagtattcaacatttccgtgtcgcccttattcccttttttgcggcattttgccttcctgtttttgctcacccagaaacgctggtgaaagtaaaagatgctgaagatcagttgggtgcacgagtgggttacatcgaactggatctcaacagcggtaagatccttgagagttttcgccccgaagaacgttttccaatgatgagcacttttaaagttctgctatgtggcgcggtattatcccgtattgacgccgggcaagagcaactcggtcgccgcatacactattctcagaatgacttggttgagtactcaccagtcacagaaaagcatcttacggatggcatgacagtaagagaattatgcagtgctgccataaccatgagtgataacactgcggccaacttacttctgacaacgatcggaggaccgaaggagctaaccgcttttttgcacaacatgggggatcatgtaactcgccttgatcgttgggaaccggagctgaatgaagccataccaaacgacgagcgtgacaccacgatgcctgtagcaatggcaacaacgttgcgcaaactattaactggcgaactacttactctagcttcccggcaacaattaatagactggatggaggcggataaagttgcaggaccacttctgcgctcggcccttccggctggctggtttattgctgataaatctggagccggtgagcgtggaagccgcggtatcattgcagcactggggccagatggtaagccctcccgtatcgtagttatctacacgacggggagtcaggcaactatggatgaacgaaatagacagatcgctgagataggtgcctcactgattaagcattggtaactgtcagaccaagtttactcatatatactttagattgatttaaaacttcatttttaatttaaaaggatctaggtgaagatcctttttgataatctcatgaccaaaatcccttaacgtgagttttcgttccactgagcgtcagaccccgtagaaaagatcaaaggatcttcttgagatcctttttttctgcgcgtaatctgctgcttgcaaacaaaaaaaccaccgctaccagcggtggtttgtttgccggatcaagagctaccaactctttttccgaaggtaactggcttcagcagagcgcagataccaaatactgttcttctagtgtagccgtagttaggccaccacttcaagaactctgtagcaccgcctacatacctcgctctgctaatcctgttaccagtggctgctgccagtggcgataagtcgtgtcttaccgggttggactcaagacgatagttaccggataaggcgcagcggtcgggctgaacggggggttcgtgcacacagcccagcttggagcgaacgacctacaccgaactgagatacctacagcgtgagctatgagaaagcgccacgcttcccgaagggagaaaggcggacaggtatccggtaagcggcagggtcggaacaggagagcgcacgagggagcttccagggggaaacgcctggtatctttatagtcctgtcgggtttcgccacctctgacttgagcgtcgatttttgtgatgctcgtcaggggggcggagcctatggaaaaacgccagcaacgcggcctttttacggttcctggccttttgctggccttttgctcacatgt

SEQ ID NO: 59 - RNA, 7996 nt, synthetic construct
  source 1..7996: mol_type = other RNA
cctgcaggcagctgcgcgctcgctcgctcactgaggccgcccgggcgtcgggcgacctttggtcgcccggcctcagtgagcgagcgagcgcgcagagagggagtggccaactccatcactaggggttcctgcggcctctagactcgaggcgttgacattgattattgactagttattaatagtaatcaattacggggtcattagttcatagcccatatatggagttccgcgttacataacttacggtaaatggcccgcctggctgaccgcccaacgacccccgcccattgacgtcaataatgacgtatgttcccatagtaacgccaatagggactttccattgacgtcaatgggtggagtatttacggtaaactgcccacttggcagtacatcaagtgtatcatatgccaagtacgccccctattgacgtcaatgacggtaaatggcccgcctggcattatgcccagtacatgaccttatgggactttcctacttggcagtacatctacgtattagtcatcgctattaccatggtgatgcggttttggcagtacatcaatgggcgtggatagcggtttgactcacggggatttccaagtctccaccccattgacgtcaatgggagtttgttttggcaccaaaatcaacgggactttccaaaatgtcgtaacaactccgccccattgacgcaaatgggcggtaggcgtgtacggtgggaggtctatataagcagagctctctggctaactaccggtgccaccatggccccaaagaagaagcggaaggtcggtatccacggagtcccagcagccaagcggaactacatcctgggcctggccatcggcatcaccagcgtgggctacggcatcatcgactacgagacacgggacgtgatcgatgccggcgtgcggctgttcaaagaggccaacgtggaaaacaacgagggcaggcggagcaagagaggcgccagaaggctgaagcggcggaggcggcatagaatccagagagtgaagaagctgctgttcgactacaacctgctgaccgaccacagcgagctgagcggcatcaacccctacgaggccagagtgaagggcctgagccagaagctgagcgaggaagagttctctgccgccctgctgcacctggccaagagaagaggcgtgcacaacgtgaacgaggtggaagaggacaccggcaacgagctgtccaccaaagagcagatcagccggaacagcaaggccctggaagagaaatacgtggccgaactgcagctggaacggctgaagaaagacggcgaagtgcggggcagcatcaacagattcaagaccagcgactacgtgaaagaagccaaacagctgctgaaggtgcagaaggcctaccaccagctggaccagagcttcatcgacacctacatcgacctgctggaaacccggcggacctactatgagggacctggcgagggcagccccttcggctggaaggacatcaaagaatggtacgagatgctgatgggccactgcacctacttccccgaggaactgcggagcgtgaagtacgcctacaacgccgacctgtacaacgccctgaacgacctgaacaatctcgtgatcaccagggacgagaacgagaagctggaatattacgagaagttccagatcatcgagaacgtgttcaagcagaagaagaagcccaccctgaagcagatcgccaaagaaatcctcgtgaacgaagaggatattaagggctacagagtgaccagcaccggcaagcccgagttcaccaacctgaaggtgtaccacgacatcaaggacattaccgcccggaaagagattattgagaacgccgagctgctggatcagattgccaagatcctgaccatctaccagagcagcgaggacatccaggaagaactgaccaatctgaactccgagctgacccaggaagagatcgagcagatctctaatctgaagggctataccggcacccacaacctgagcctgaaggccatcaacctgatcctggacgagctgtggcacaccaacgacaaccagatcgctatcttcaaccggctgaagctggtgcccaagaaggtggacctgtcccagcagaaagagatccccaccaccctggtggacgacttcatcctgagccccgtcgtgaagagaagcttcatccagagcatcaaagtgatcaacgccatcatcaagaagtacggcctgcccaacgacatcattatcgagctggcccgcgagaagaactccaaggacgcccagaaaatgatcaacgagatgcagaagcggaaccggcagaccaacgagcggatcgaggaaatcatccggaccaccggcaaagagaacgccaagtacctgatcgagaagatcaagctgcacgacatgcaggaaggcaagtgcctgtacagcctggaagccatccctctggaagatctgctgaacaaccccttcaactatgaggtggaccacatcatccccagaagcgtgtccttcgacaacagcttcaacaacaaggtgctcgtgaagcaggaagaagccagcaagaagggcaaccggaccccattccagtacctgagcagcagcgacagcaagatcagctacgaaaccttcaagaagcacatcctgaatctggccaagggcaagggcagaatcagcaagaccaagaaagagtatctgctggaagaacgggacatcaacaggttctccgtgcagaaagacttcatcaaccggaacctggtggataccagatacgccaccagaggcctgatgaacctgctgcggagctacttcagagtgaacaacctggacgtgaaagtgaagtccatcaatggcggcttcaccagctttctgcggcggaagtggaagtttaagaaagagcggaacaaggggtacaagcaccacgccgaggacgccctgatcattgccaacgccgatttcatcttcaaagagtggaagaaactggacaaggccaaaaaagtgatggaaaaccagatgttcgaggaaaagcaggccgagagcatgcccgagatcgaaaccgagcaggagtacaaagagatcttcatcaccccccaccagatcaagcacattaaggacttcaaggactacaagtacagccaccgggtggacaagaagcctaatagagagctgattaacgacaccctgtactccacccggaaggacgacaagggcaacaccctgatcgtgaacaatctgaacggcctgtacgacaaggacaatgacaagctgaaaaagctgatcaacaagagccccgaaaagctgctgatgtaccaccacgacccccagacctaccagaaactgaagctgattatggaacagtacggcgacgagaagaatcccctgtacaagtactacgaggaaaccgggaactacctgaccaagtactccaaaaaggacaacggccccgtgatcaagaagattaagtattacggcaacaaactgaacgcccatctggacatcaccgacgactaccccaacagcagaaacaaggtcgtgaagctgtccctgaagccctacagattcgacgtgtacctggacaatggcgtgtacaagttcgtgaccgtgaagaatctggatgtgatcaaaaaagaaaactactacgaagtgaatagcaagtgctatgaggaagctaagaagctgaagaagatcagcaaccaggccgagtttatcgcctccttctacaacaacgatctgatcaagatcaacggcgagctgtatagagtgatcggcgtgaacaacgacctgctgaaccggatcgaagtgaacatgatcgacatcacctaccgcgagtacctggaaaacatgaacgacaagaggccccccaggatcattaagacaatcgcctccaagacccagagcattaagaagtacagcacagacattctgggcaacctgtatgaagtgaaatctaagaagcaccctcagatcatcaaaaagggcaaaaggccggcggccacgaaaaaggccggccaggcaaaaaagaaaaagggatccggacgggctgacgcattggacgattttgatctggatatgctgggaagtgacgccctcgatgattttgaccttgacatgcttggttcggatgcccttgatgactttgacctcgacatgctcggcagtgacgcccttgatgatttcgacctggacatgctgattaactgtacaggcagtggagagggcagaggaagtctgctaacatgcggtgacgtcgaggagaatcctggcccaatggccaagcctttgtctcaagaagaatccaccctcattgaaagagcaacggctacaatcaacagcatccccatctctgaagactacagcgtcgccagcgcagctctctctagcgacggccgcatcttcactggtgtcaatgtatatcattttactgggggaccttgtgcagaactcgtggtgctgggcactgctgctgctgcggcagctggcaacctgacttgtatcgtcgcgatcggaaatgagaacaggggcatcttgagcccctgcggacggtgccgacaggtgcttctcgatctgcatcctgggatcaaagccatagtgaaggacagtgatggacagccgacggcagttgggattcgtgaattgctgccctctggttatgtgtgggagggctaagaattcctagagctcgctgatcagcctcgactgtgccttctagttgccagccatctgttgtttgcccctcccccgtgccttccttgaccctggaaggtgccactcccactgtcctttcctaataaaatgaggaaattgcatcgcattgtctgagtaggtgtcattctattctggggggtggggtggggcaggacagcaagggggaggattgggaagagaatagcaggcatgctggggaggtaccgagggcctatttcccatgattccttcatatttgcatatacgatacaaggctgttagagagataattggaattaatttgactgtaaacacaaagatattagtacaaaatacgtgacgtagaaagtaataatttcttgggtagtttgcagttttaaaattatgttttaaaatggactatcatatgcttaccgtaacttgaaagtatttcgatttcttggctttatatatcttgtggaaaggacgaaacaccaggggcctctagaaggatcccgttttagtactctggaaacagaatctactaaaacaaggcaaaatgccgtgtttatctcgtcaacttgttggcgagatttttgcggccgcaggaacccctagtgatggagttggccactccctctctgcgcgctcgctcgctcactgaggccgggcgaccaaaggtcgcccgacgcccgggctttgcccgggcggcctcagtgagcgagcgagcgcgcagctgcctgcaggggcgcctgatgcggtattttctccttacgcatctgtgcggtatttcacaccgcatacgtcaaagcaaccatagtacgcgccctgtagcggcgcattaagcgcggcgggtgtggtggttacgcgcagcgtgaccgctacacttgccagcgccttagcgcccgctcctttcgctttcttcccttcctttctcgccacgttcgccggctttccccgtcaagctctaaatcgggggctccctttagggttccgatttagtgctttacggcacctcgaccccaaaaaacttgatttgggtgatggttcacgtagtgggccatcgccctgatagacggtttttcgccctttgacgttggagtccacgttctttaatagtggactcttgttccaaactggaacaacactcaactctatctcgggctattcttttgatttataagggattttgccgatttcggtctattggttaaaaaatgagctgatttaacaaaaatttaacgcgaattttaacaaaatattaacgtttacaattttatggtgcactctcagtacaatctgctctgatgccgcatagttaagccagccccgacacccgccaacacccgctgacgcgccctgacgggcttgtctgctcccggcatccgcttacagacaagctgtgaccgtctccgggagctgcatgtgtcagaggttttcaccgtcatcaccgaaacgcgcgagacgaaagggcctcgtgatacgcctatttttataggttaatgtcatgataataatggtttcttagacgtcaggtggcacttttcggggaaatgtgcgcggaacccctatttgtttatttttctaaatacattcaaatatgtatccgctcatgagacaataaccctgataaatgcttcaataatattgaaaaaggaagagtatgagtattcaacatttccgtgtcgcccttattcccttttttgcggcattttgccttcctgtttttgctcacccagaaacgctggtgaaagtaaaagatgctgaagatcagttgggtgcacgagtgggttacatcgaactggatctcaacagcggtaagatccttgagagttttcgccccgaagaacgttttccaatgatgagcacttttaaagttctgctatgtggcgcggtattatcccgtattgacgccgggcaagagcaactcggtcgccgcatacactattctcagaatgacttggttgagtactcaccagtcacagaaaagcatcttacggatggcatgacagtaagagaattatgcagtgctgccataaccatgagtgataacactgcggccaacttacttctgacaacgatcggaggaccgaaggagctaaccgcttttttgcacaacatgggggatcatgtaactcgccttgatcgttgggaaccggagctgaatgaagccataccaaacgacgagcgtgacaccacgatgcctgtagcaatggcaacaacgttgcgcaaactattaactggcgaactacttactctagcttcccggcaacaattaatagactggatggaggcggataaagttgcaggaccacttctgcgctcggcccttccggctggctggtttattgctgataaatctggagccggtgagcgtggaagccgcggtatcattgcagcactggggccagatggtaagccctcccgtatcgtagttatctacacgacggggagtcaggcaactatggatgaacgaaatagacagatcgctgagataggtgcctcactgattaagcattggtaactgtcagaccaagtttactcatatatactttagattgatttaaaacttcatttttaatttaaaaggatctaggtgaagatcctttttgataatctcatgaccaaaatcccttaacgtgagttttcgttccactgagcgtcagaccccgtagaaaagatcaaaggatcttcttgagatcctttttttctgcgcgtaatctgctgcttgcaaacaaaaaaaccaccgctaccagcggtggtttgtttgccggatcaagagctaccaactctttttccgaaggtaactggcttcagcagagcgcagataccaaatactgttcttctagtgtagccgtagttaggccaccacttcaagaactctgtagcaccgcctacatacctcgctctgctaatcctgttaccagtggctgctgccagtggcgataagtcgtgtcttaccgggttggactcaagacgatagttaccggataaggcgcagcggtcgggctgaacggggggttcgtgcacacagcccagcttggagcgaacgacctacaccgaactgagatacctacagcgtgagctatgagaaagcgccacgcttcccgaagggagaaaggcggacaggtatccggtaagcggcagggtcggaacaggagagcgcacgagggagcttccagggggaaacgcctggtatctttatagtcctgtcgggtttcgccacctctgacttgagcgtcgatttttgtgatgctcgtcaggggggcggagcctatggaaaaacgccagcaacgcggcctttttacggttcctggccttttgctggccttttgctcacatgt

SEQ ID NO: 60 - RNA, 7996 nt, synthetic construct
  source 1..7996: mol_type = other RNA
cctgcaggcagctgcgcgctcgctcgctcactgaggccgcccgggcgtcgggcgacctttggtcgcccggcctcagtgagcgagcgagcgcgcagagagggagtggccaactccatcactaggggttcctgcggcctctagactcgaggcgttgacattgattattgactagttattaatagtaatcaattacggggtcattagttcatagcccatatatggagttccgcgttacataacttacggtaaatggcccgcctggctgaccgcccaacgacccccgcccattgacgtcaataatgacgtatgttcccatagtaacgccaatagggactttccattgacgtcaatgggtggagtatttacggtaaactgcccacttggcagtacatcaagtgtatcatatgccaagtacgccccctattgacgtcaatgacggtaaatggcccgcctggcattatgcccagtacatgaccttatgggactttcctacttggcagtacatctacgtattagtcatcgctattaccatggtgatgcggttttggcagtacatcaatgggcgtggatagcggtttgactcacggggatttccaagtctccaccccattgacgtcaatgggagtttgttttggcaccaaaatcaacgggactttccaaaatgtcgtaacaactccgccccattgacgcaaatgggcggtaggcgtgtacggtgggaggtctatataagcagagctctctggctaactaccggtgccaccatggccccaaagaagaagcggaaggtcggtatccacggagtcccagcagccaagcggaactacatcctgggcctggccatcggcatcaccagcgtgggctacggcatcatcgactacgagacacgggacgtgatcgatgccggcgtgcggctgttcaaagaggccaacgtggaaaacaacgagggcaggcggagcaagagaggcgccagaaggctgaagcggcggaggcggcatagaatccagagagtgaagaagctgctgttcgactacaacctgctgaccgaccacagcgagctgagcggcatcaacccctacgaggccagagtgaagggcctgagccagaagctgagcgaggaagagttctctgccgccctgctgcacctggccaagagaagaggcgtgcacaacgtgaacgaggtggaagaggacaccggcaacgagctgtccaccaaagagcagatcagccggaacagcaaggccctggaagagaaatacgtggccgaactgcagctggaacggctgaagaaagacggcgaagtgcggggcagcatcaacagattcaagaccagcgactacgtgaaagaagccaaacagctgctgaaggtgcagaaggcctaccaccagctggaccagagcttcatcgacacctacatcgacctgctggaaacccggcggacctactatgagggacctggcgagggcagccccttcggctggaaggacatcaaagaatggtacgagatgctgatgggccactgcacctacttccccgaggaactgcggagcgtgaagtacgcctacaacgccgacctgtacaacgccctgaacgacctgaacaatctcgtgatcaccagggacgagaacgagaagctggaatattacgagaagttccagatcatcgagaacgtgttcaagcagaagaagaagcccaccctgaagcagatcgccaaagaaatcctcgtgaacgaagaggatattaagggctacagagtgaccagcaccggcaagcccgagttcaccaacctgaaggtgtaccacgacatcaaggacattaccgcccggaaagagattattgagaacgccgagctgctggatcagattgccaagatcctgaccatctaccagagcagcgaggacatccaggaagaactgaccaatctgaactccgagctgacccaggaagagatcgagcagatctctaatctgaagggctataccggcacccacaacctgagcctgaaggccatcaacctgatcctggacgagctgtggcacaccaacgacaaccagatcgctatcttcaaccggctgaagctggtgcccaagaaggtggacctgtcccagcagaaagagatccccaccaccctggtggacgacttcatcctgagccccgtcgtgaagagaagcttcatccagagcatcaaagtgatcaacgccatcatcaagaagtacggcctgcccaacgacatcattatcgagctggcccgcgagaagaactccaaggacgcccagaaaatgatcaacgagatgcagaagcggaaccggcagaccaacgagcggatcgaggaaatcatccggaccaccggcaaagagaacgccaagtacctgatcgagaagatcaagctgcacgacatgcaggaaggcaagtgcctgtacagcctggaagccatccctctggaagatctgctgaacaaccccttcaactatgaggtggaccacatcatccccagaagcgtgtccttcgacaacagcttcaacaacaaggtgctcgtgaagcaggaagaagccagcaagaagggcaaccggaccccattccagtacctgagcagcagcgacagcaagatcagctacgaaaccttcaagaagcacatcctgaatctggccaagggcaagggcagaatcagcaagaccaagaaagagtatctgctggaagaacgggacatcaacaggttctccgtgcagaaagacttcatcaaccggaacctggtggataccagatacgccaccagaggcctgatgaacctgctgcggagctacttcagagtgaacaacctggacgtgaaagtgaagtccatcaatggcggcttcaccagctttctgcggcggaagtggaagtttaagaaagagcggaacaaggggtacaagcaccacgccgaggacgccctgatcattgccaacgccgatttcatcttcaaagagtggaagaaactggacaaggccaaaaaagtgatggaaaaccagatgttcgaggaaaagcaggccgagagcatgcccgagatcgaaaccgagcaggagtacaaagagatcttcatcaccccccaccagatcaagcacattaaggacttcaaggactacaagtacagccaccgggtggacaagaagcctaatagagagctgattaacgacaccctgtactccacccggaaggacgacaagggcaacaccctgatcgtgaacaatctgaacggcctgtacgacaaggacaatgacaagctgaaaaagctgatcaacaagagccccgaaaagctgctgatgtaccaccacgacccccagacctaccagaaactgaagctgattatggaacagtacggcgacgagaagaatcccctgtacaagtactacgaggaaaccgggaactacctgaccaagtactccaaaaaggacaacggccccgtgatcaagaagattaagtattacggcaacaaactgaacgcccatctggacatcaccgacgactaccccaacagcagaaacaaggtcgtgaagctgtccctgaagccctacagattcgacgtgtacctggacaatggcgtgtacaagttcgtgaccgtgaagaatctggatgtgatcaaaaaagaaaactactacgaagtgaatagcaagtgctatgaggaagctaagaagctgaagaagatcagcaaccaggccgagtttatcgcctccttctacaacaacgatctgatcaagatcaacggcgagctgtatagagtgatcggcgtgaacaacgacctgctgaaccggatcgaagtgaacatgatcgacatcacctaccgcgagtacctggaaaacatgaacgacaagaggccccccaggatcattaagacaatcgcctccaagacccagagcattaagaagtacagcacagacattctgggcaacctgtatgaagtgaaatctaagaagcaccctcagatcatcaaaaagggcaaaaggccggcggccacgaaaaaggccggccaggcaaaaaagaaaaagggatccggacgggctgacgcattggacgattttgatctggatatgctgggaagtgacgccctcgatgattttgaccttgacatgcttggttcggatgcccttgatgactttgacctcgacatgctcggcagtgacgcccttgatgatttcgacctggacatgctgattaactgtacaggcagtggagagggcagaggaagtctgctaacatgcggtgacgtcgaggagaatcctggcccaatggccaagcctttgtctcaagaagaatccaccctcattgaaagagcaacggctacaatcaacagcatccccatctctgaagactacagcgtcgccagcgcagctctctctagcgacggccgcatcttcactggtgtcaatgtatatcattttactgggggaccttgtgcagaactcgtggtgctgggcactgctgctgctgcggcagctggcaacctgacttgtatcgtcgcgatcggaaatgagaacaggggcatcttgagcccctgcggacggtgccgacaggtgcttctcgatctgcatcctgggatcaaagccatagtgaaggacagtgatggacagccgacggcagttgggattcgtgaattgctgccctctggttatgtgtgggagggctaagaattcctagagctcgctgatcagcctcgactgtgccttctagttgccagccatctgttgtttgcccctcccccgtgccttccttgaccctggaaggtgccactcccactgtcctttcctaataaaatgaggaaattgcatcgcattgtctgagtaggtgtcattctattctggggggtggggtggggcaggacagcaagggggaggattgggaagagaatagcaggcatgctggggaggtaccgagggcctatttcccatgattccttcatatttgcatatacgatacaaggctgttagagagataattggaattaatttgactgtaaacacaaagatattagtacaaaatacgtgacgtagaaagtaataatttcttgggtagtttgcagttttaaaattatgttttaaaatggactatcatatgcttaccgtaacttgaaagtatttcgatttcttggctttatatatcttgtggaaaggacgaaacaccttgattaaagaggttggtggtgttttagtactctggaaacagaatctactaaaacaaggcaaaatgccgtgtttatctcgtcaacttgttggcgagatttttgcggccgcaggaacccctagtgatggagttggccactccctctctgcgcgctcgctcgctcactgaggccgggcgaccaaaggtcgcccgacgcccgggctttgcccgggcggcctcagtgagcgagcgagcgcgcagctgcctgcaggggcgcctgatgcggtattttctccttacgcatctgtgcggtatttcacaccgcatacgtcaaagcaaccatagtacgcgccctgtagcggcgcattaagcgcggcgggtgtggtggttacgcgcagcgtgaccgctacacttgccagcgccttagcgcccgctcctttcgctttcttcccttcctttctcgccacgttcgccggctttccccgtcaagctctaaatcgggggctccctttagggttccgatttagtgctttacggcacctcgaccccaaaaaacttgatttgggtgatggttcacgtagtgggccatcgccctgatagacggtttttcgccctttgacgttggagtccacgttctttaatagtggactcttgttccaaactggaacaacactcaactctatctcgggctattcttttgatttataagggattttgccgatttcggtctattggttaaaaaatgagctgatttaacaaaaatttaacgcgaattttaacaaaatattaacgtttacaattttatggtgcactctcagtacaatctgctctgatgccgcatagttaagccagccccgacacccgccaacacccgctgacgcgccctgacgggcttgtctgctcccggcatccgcttacagacaagctgtgaccgtctccgggagctgcatgtgtcagaggttttcaccgtcatcaccgaaacgcgcgagacgaaagggcctcgtgatacgcctatttttataggttaatgtcatgataataatggtttcttagacgtcaggtggcacttttcggggaaatgtgcgcggaacccctatttgtttatttttctaaatacattcaaatatgtatccgctcatgagacaataaccctgataaatgcttcaataatattgaaaaaggaagagtatgagtattcaacatttccgtgtcgcccttattcccttttttgcggcattttgccttcctgtttttgctcacccagaaacgctggtgaaagtaaaagatgctgaagatcagttgggtgcacgagtgggttacatcgaactggatctcaacagcggtaagatccttgagagttttcgccccgaagaacgttttccaatgatgagcacttttaaagttctgctatgtggcgcggtattatcccgtattgacgccgggcaagagcaactcggtcgccgcatacactattctcagaatgacttggttgagtactcaccagtcacagaaaagcatcttacggatggcatgacagtaagagaattatgcagtgctgccataaccatgagtgataacactgcggccaacttacttctgacaacgatcggaggaccgaaggagctaaccgcttttttgcacaacatgggggatcatgtaactcgccttgatcgttgggaaccggagctgaatgaagccataccaaacgacgagcgtgacaccacgatgcctgtagcaatggcaacaacgttgcgcaaactattaactggcgaactacttactctagcttcccggcaacaattaatagactggatggaggcggataaagttgcaggaccacttctgcgctcggcccttccggctggctggtttattgctgataaatctggagccggtgagcgtggaagccgcggtatcattgcagcactggggccagatggtaagccctcccgtatcgtagttatctacacgacggggagtcaggcaactatggatgaacgaaatagacagatcgctgagataggtgcctcactgattaagcattggtaactgtcagaccaagtttactcatatatactttagattgatttaaaacttcatttttaatttaaaaggatctaggtgaagatcctttttgataatctcatgaccaaaatcccttaacgtgagttttcgttccactgagcgtcagaccccgtagaaaagatcaaaggatcttcttgagatcctttttttctgcgcgtaatctgctgcttgcaaacaaaaaaaccaccgctaccagcggtggtttgtttgccggatcaagagctaccaactctttttccgaaggtaactggcttcagcagagcgcagataccaaatactgttcttctagtgtagccgtagttaggccaccacttcaagaactctgtagcaccgcctacatacctcgctctgctaatcctgttaccagtggctgctgccagtggcgataagtcgtgtcttaccgggttggactcaagacgatagttaccggataaggcgcagcggtcgggctgaacggggggttcgtgcacacagcccagcttggagcgaacgacctacaccgaactgagatacctacagcgtgagctatgagaaagcgccacgcttcccgaagggagaaaggcggacaggtatccggtaagcggcagggtcggaacaggagagcgcacgagggagcttccagggggaaacgcctggtatctttatagtcctgtcgggtttcgccacctctgacttgagcgtcgatttttgtgatgctcgtcaggggggcggagcctatggaaaaacgccagcaacgcggcctttttacggttcctggccttttgctggccttttgctcacatgt

SEQ ID NO: 61 - RNA, 7996 nt, synthetic construct
  source 1..7996: mol_type = other RNA
cctgcaggcagctgcgcgctcgctcgctcactgaggccgcccgggcgtcgggcgacctttggtcgcccggcctcagtgagcgagcgagcgcgcagagagggagtggccaactccatcactaggggttcctgcggcctctagactcgaggcgttgacattgattattgactagttattaatagtaatcaattacggggtcattagttcatagcccatatatggagttccgcgttacataacttacggtaaatggcccgcctggctgaccgcccaacgacccccgcccattgacgtcaataatgacgtatgttcccatagtaacgccaatagggactttccattgacgtcaatgggtggagtatttacggtaaactgcccacttggcagtacatcaagtgtatcatatgccaagtacgccccctattgacgtcaatgacggtaaatggcccgcctggcattatgcccagtacatgaccttatgggactttcctacttggcagtacatctacgtattagtcatcgctattaccatggtgatgcggttttggcagtacatcaatgggcgtggatagcggtttgactcacggggatttccaagtctccaccccattgacgtcaatgggagtttgttttggcaccaaaatcaacgggactttccaaaatgtcgtaacaactccgccccattgacgcaaatgggcggtaggcgtgtacggtgggaggtctatataagcagagctctctggctaactaccggtgccaccatggccccaaagaagaagcggaaggtcggtatccacggagtcccagcagccaagcggaactacatcctgggcctggccatcggcatcaccagcgtgggctacggcatcatcgactacgagacacgggacgtgatcgatgccggcgtgcggctgttcaaagaggccaacgtggaaaacaacgagggcaggcggagcaagagaggcgccagaaggctgaagcggcggaggcggcatagaatccagagagtgaagaagctgctgttcgactacaacctgctgaccgaccacagcgagctgagcggcatcaacccctacgaggccagagtgaagggcctgagccagaagctgagcgaggaagagttctctgccgccctgctgcacctggccaagagaagaggcgtgcacaacgtgaacgaggtggaagaggacaccggcaacgagctgtccaccaaagagcagatcagccggaacagcaaggccctggaagagaaatacgtggccgaactgcagctggaacggctgaagaaagacggcgaagtgcggggcagcatcaacagattcaagaccagcgactacgtgaaagaagccaaacagctgctgaaggtgcagaaggcctaccaccagctggaccagagcttcatcgacacctacatcgacctgctggaaacccggcggacctactatgagggacctggcgagggcagccccttcggctggaaggacatcaaagaatggtacgagatgctgatgggccactgcacctacttccccgaggaactgcggagcgtgaagtacgcctacaacgccgacctgtacaacgccctgaacgacctgaacaatctcgtgatcaccagggacgagaacgagaagctggaatattacgagaagttccagatcatcgagaacgtgttcaagcagaagaagaagcccaccctgaagcagatcgccaaagaaatcctcgtgaacgaagaggatattaagggctacagagtgaccagcaccggcaagcccgagttcaccaacctgaaggtgtaccacgacatcaaggacattaccgcccggaaagagattattgagaacgccgagctgctggatcagattgccaagatcctgaccatctaccagagcagcgaggacatccaggaagaactgaccaatctgaactccgagctgacccaggaagagatcgagcagatctctaatctgaagggctataccggcacccacaacctgagcctgaaggccatcaacctgatcctggacgagctgtggcacaccaacgacaaccagatcgctatcttcaaccggctgaagctggtgcccaagaaggtggacctgtcccagcagaaagagatccccaccaccctggtggacgacttcatcctgagccccgtcgtgaagagaagcttcatccagagcatcaaagtgatcaacgccatcatcaagaagtacggcctgcccaacgacatcattatcgagctggcccgcgagaagaactccaaggacgcccagaaaatgatcaacgagatgcagaagcggaaccggcagaccaacgagcggatcgaggaaatcatccggaccaccggcaaagagaacgccaagtacctgatcgagaagatcaagctgcacgacatgcaggaaggcaagtgcctgtacagcctggaagccatccctctggaagatctgctgaacaaccccttcaactatgaggtggaccacatcatccccagaagcgtgtccttcgacaacagcttcaacaacaaggtgctcgtgaagcaggaagaagccagcaagaagggcaaccggaccccattccagtacctgagcagcagcgacagcaagatcagctacgaaaccttcaagaagcacatcctgaatctggccaagggcaagggcagaatcagcaagaccaagaaagagtatctgctggaagaacgggacatcaacaggttctccgtgcagaaagacttcatcaaccggaacctggtggataccagatacgccaccagaggcctgatgaacctgctgcggagctacttcagagtgaacaacctggacgtgaaagtgaagtccatcaatggcggcttcaccagctttctgcggcggaagtggaagtttaagaaagagcggaacaaggggtacaagcaccacgccgaggacgccctgatcattgccaacgccgatttcatcttcaaagagtggaagaaactggacaaggccaaaaaagtgatggaaaaccagatgttcgaggaaaagcaggccgagagcatgcccgagatcgaaaccgagcaggagtacaaagagatcttcatcaccccccaccagatcaagcacattaaggacttcaaggactacaagtacagccaccgggtggacaagaagcctaatagagagctgattaacgacaccctgtactccacccggaaggacgacaagggcaacaccctgatcgtgaacaatctgaacggcctgtacgacaaggacaatgacaagctgaaaaagctgatcaacaagagccccgaaaagctgctgatgtaccaccacgacccccagacctaccagaaactgaagctgattatggaacagtacggcgacgagaagaatcccctgtacaagtactacgaggaaaccgggaactacctgaccaagtactccaaaaaggacaacggccccgtgatcaagaagattaagtattacggcaacaaactgaacgcccatctggacatcaccgacgactaccccaacagcagaaacaaggtcgtgaagctgtccctgaagccctacagattcgacgtgtacctggacaatggcgtgtacaagttcgtgaccgtgaagaatctggatgtgatcaaaaaagaaaactactacgaagtgaatagcaagtgctatgaggaagctaagaagctgaagaagatcagcaaccaggccgagtttatcgcctccttctacaacaacgatctgatcaagatcaacggcgagctgtatagagtgatcggcgtgaacaacgacctgctgaaccggatcgaagtgaacatgatcgacatcacctaccgcgagtacctggaaaacatgaacgacaagaggccccccaggatcattaagacaatcgcctccaagacccagagcattaagaagtacagcacagacattctgggcaacctgtatgaagtgaaatctaagaagcaccctcagatcatcaaaaagggcaaaaggccggcggccacgaaaaaggccggccaggcaaaaaagaaaaagggatccggacgggctgacgcattggacgattttgatctggatatgctgggaagtgacgccctcgatgattttgaccttgacatgcttggttcggatgcccttgatgactttgacctcgacatgctcggcagtgacgcccttgatgatttcgacctggacatgctgattaactgtacaggcagtggagagggcagaggaagtctgctaacatgcggtgacgtcgaggagaatcctggcccaatggccaagcctttgtctcaagaagaatccaccctcattgaaagagcaacggctacaatcaacagcatccccatctctgaagactacagcgtcgccagcgcagctctctctagcgacggccgcatcttcactggtgtcaatgtatatcattttactgggggaccttgtgcagaactcgtggtgctgggcactgctgctgctgcggcagctggcaacctgacttgtatcgtcgcgatcggaaatgagaacaggggcatcttgagcccctgcggacggtgccgacaggtgcttctcgatctgcatcctgggatcaaagccatagtgaaggacagtgatggacagccgacggcagttgggattcgtgaattgctgccctctggttatgtgtgggagggctaagaattcctagagctcgctgatcagcctcgactgtgccttctagttgccagccatctgttgtttgcccctcccccgtgccttccttgaccctggaaggtgccactcccactgtcctttcctaataaaatgaggaaattgcatcgcattgtctgagtaggtgtcattctattctggggggtggggtggggcaggacagcaagggggaggattgggaagagaatagcaggcatgctggggaggtaccgagggcctatttcccatgattccttcatatttgcatatacgatacaaggctgttagagagataattggaattaatttgactgtaaacacaaagatattagtacaaaatacgtgacgtagaaagtaataatttcttgggtagtttgcagttttaaaattatgttttaaaatggactatcatatgcttaccgtaacttgaaagtatttcgatttcttggctttatatatcttgtggaaaggacgaaacaccgaatttaactagctgtatcccgttttagtactctggaaacagaatctactaaaacaaggcaaaatgccgtgtttatctcgtcaacttgttggcgagatttttgcggccgcaggaacccctagtgatggagttggccactccctctctgcgcgctcgctcgctcactgaggccgggcgaccaaaggtcgcccgacgcccgggctttgcccgggcggcctcagtgagcgagcgagcgcgcagctgcctgcaggggcgcctgatgcggtattttctccttacgcatctgtgcggtatttcacaccgcatacgtcaaagcaaccatagtacgcgccctgtagcggcgcattaagcgcggcgggtgtggtggttacgcgcagcgtgaccgctacacttgccagcgccttagcgcccgctcctttcgctttcttcccttcctttctcgccacgttcgccggctttccccgtcaagctctaaatcgggggctccctttagggttccgatttagtgctttacggcacctcgaccccaaaaaacttgatttgggtgatggttcacgtagtgggccatcgccctgatagacggtttttcgccctttgacgttggagtccacgttctttaatagtggactcttgttccaaactggaacaacactcaactctatctcgggctattcttttgatttataagggattttgccgatttcggtctattggttaaaaaatgagctgatttaacaaaaatttaacgcgaattttaacaaaatattaacgtttacaattttatggtgcactctcagtacaatctgctctgatgccgcatagttaagccagccccgacacccgccaacacccgctgacgcgccctgacgggcttgtctgctcccggcatccgcttacagacaagctgtgaccgtctccgggagctgcatgtgtcagaggttttcaccgtcatcaccgaaacgcgcgagacgaaagggcctcgtgatacgcctatttttataggttaatgtcatgataataatggtttcttagacgtcaggtggcacttttcggggaaatgtgcgcggaacccctatttgtttatttttctaaatacattcaaatatgtatccgctcatgagacaataaccctgataaatgcttcaataatattgaaaaaggaagagtatgagtattcaacatttccgtgtcgcccttattcccttttttgcggcattttgccttcctgtttttgctcacccagaaacgctggtgaaagtaaaagatgctgaagatcagttgggtgcacgagtgggttacatcgaactggatctcaacagcggtaagatccttgagagttttcgccccgaagaacgttttccaatgatgagcacttttaaagttctgctatgtggcgcggtattatcccgtattgacgccgggcaagagcaactcggtcgccgcatacactattctcagaatgacttggttgagtactcaccagtcacagaaaagcatcttacggatggcatgacagtaagagaattatgcagtgctgccataaccatgagtgataacactgcggccaacttacttctgacaacgatcggaggaccgaaggagctaaccgcttttttgcacaacatgggggatcatgtaactcgccttgatcgttgggaaccggagctgaatgaagccataccaaacgacgagcgtgacaccacgatgcctgtagcaatggcaacaacgttgcgcaaactattaactggcgaactacttactctagcttcccggcaacaattaatagactggatggaggcggataaagttgcaggaccacttctgcgctcggcccttccggctggctggtttattgctgataaatctggagccggtgagcgtggaagccgcggtatcattgcagcactggggccagatggtaagccctcccgtatcgtagttatctacacgacggggagtcaggcaactatggatgaacgaaatagacagatcgctgagataggtgcctcactgattaagcattggtaactgtcagaccaagtttactcatatatactttagattgatttaaaacttcatttttaatttaaaaggatctaggtgaagatcctttttgataatctcatgaccaaaatcccttaacgtgagttttcgttccactgagcgtcagaccccgtagaaaagatcaaaggatcttcttgagatcctttttttctgcgcgtaatctgctgcttgcaaacaaaaaaaccaccgctaccagcggtggtttgtttgccggatcaagagctaccaactctttttccgaaggtaactggcttcagcagagcgcagataccaaatactgttcttctagtgtagccgtagttaggccaccacttcaagaactctgtagcaccgcctacatacctcgctctgctaatcctgttaccagtggctgctgccagtggcgataagtcgtgtcttaccgggttggactcaagacgatagttaccggataaggcgcagcggtcgggctgaacggggggttcgtgcacacagcccagcttggagcgaacgacctacaccgaactgagatacctacagcgtgagctatgagaaagcgccacgcttcccgaagggagaaaggcggacaggtatccggtaagcggcagggtcggaacaggagagcgcacgagggagcttccagggggaaacgcctggtatctttatagtcctgtcgggtttcgccacctctgacttgagcgtcgatttttgtgatgctcgtcaggggggcggagcctatggaaaaacgccagcaacgcggcctttttacggttcctggccttttgctggccttttgctcacatgt

SEQ ID NO: 62 - RNA, 7996 nt, synthetic construct
  source 1..7996: mol_type = other RNA
cctgcaggcagctgcgcgctcgctcgctcactgaggccgcccgggcgtcgggcgacctttggtcgcccggcctcagtgagcgagcgagcgcgcagagagggagtggccaactccatcactaggggttcctgcggcctctagactcgaggcgttgacattgattattgactagttattaatagtaatcaattacggggtcattagttcatagcccatatatggagttccgcgttacataacttacggtaaatggcccgcctggctgaccgcccaacgacccccgcccattgacgtcaataatgacgtatgttcccatagtaacgccaatagggactttccattgacgtcaatgggtggagtatttacggtaaactgcccacttggcagtacatcaagtgtatcatatgccaagtacgccccctattgacgtcaatgacggtaaatggcccgcctggcattatgcccagtacatgaccttatgggactttcctacttggcagtacatctacgtattagtcatcgctattaccatggtgatgcggttttggcagtacatcaatgggcgtggatagcggtttgactcacggggatttccaagtctccaccccattgacgtcaatgggagtttgttttggcaccaaaatcaacgggactttccaaaatgtcgtaacaactccgccccattgacgcaaatgggcggtaggcgtgtacggtgggaggtctatataagcagagctctctggctaactaccggtgccaccatggccccaaagaagaagcggaaggtcggtatccacggagtcccagcagccaagcggaactacatcctgggcctggccatcggcatcaccagcgtgggctacggcatcatcgactacgagacacgggacgtgatcgatgccggcgtgcggctgttcaaagaggccaacgtggaaaacaacgagggcaggcggagcaagagaggcgccagaaggctgaagcggcggaggcggcatagaatccagagagtgaagaagctgctgttcgactacaacctgctgaccgaccacagcgagctgagcggcatcaacccctacgaggccagagtgaagggcctgagccagaagctgagcgaggaagagttctctgccgccctgctgcacctggccaagagaagaggcgtgcacaacgtgaacgaggtggaagaggacaccggcaacgagctgtccaccaaagagcagatcagccggaacagcaaggccctggaagagaaatacgtggccgaactgcagctggaacggctgaagaaagacggcgaagtgcggggcagcatcaacagattcaagaccagcgactacgtgaaagaagccaaacagctgctgaaggtgcagaaggcctaccaccagctggaccagagcttcatcgacacctacatcgacctgctggaaacccggcggacctactatgagggacctggcgagggcagccccttcggctggaaggacatcaaagaatggtacgagatgctgatgggccactgcacctacttccccgaggaactgcggagcgtgaagtacgcctacaacgccgacctgtacaacgccctgaacgacctgaacaatctcgtgatcaccagggacgagaacgagaagctggaatattacgagaagttccagatcatcgagaacgtgttcaagcagaagaagaagcccaccctgaagcagatcgccaaagaaatcctcgtgaacgaagaggatattaagggctacagagtgaccagcaccggcaagcccgagttcaccaacctgaaggtgtaccacgacatcaaggacattaccgcccggaaagagattattgagaacgccgagctgctggatcagattgccaagatcctgaccatctaccagagcagcgaggacatccaggaagaactgaccaatctgaactccgagctgacccaggaagagatcgagcagatctctaatctgaagggctataccggcacccacaacctgagcctgaaggccatcaacctgatcctggacgagctgtggcacaccaacgacaaccagatcgctatcttcaaccggctgaagctggtgcccaagaaggtggacctgtcccagcagaaagagatccccaccaccctggtggacgacttcatcctgagccccgtcgtgaagagaagcttcatccagagcatcaaagtgatcaacgccatcatcaagaagtacggcctgcccaacgacatcattatcgagctggcccgcgagaagaactccaaggacgcccagaaaatgatcaacgagatgcagaagcggaaccggcagaccaacgagcggatcgaggaaatcatccggaccaccggcaaagagaacgccaagtacctgatcgagaagatcaagctgcacgacatgcaggaaggcaagtgcctgtacagcctggaagccatccctctggaagatctgctgaacaaccccttcaactatgaggtggaccacatcatccccagaagcgtgtccttcgacaacagcttcaacaacaaggtgctcgtgaagcaggaagaagccagcaagaagggcaaccggaccccattccagtacctgagcagcagcgacagcaagatcagctacgaaaccttcaagaagcacatcctgaatctggccaagggcaagggcagaatcagcaagaccaagaaagagtatctgctggaagaacgggacatcaacaggttctccgtgcagaaagacttcatcaaccggaacctggtggataccagatacgccaccagaggcctgatgaacctgctgcggagctacttcagagtgaacaacctggacgtgaaagtgaagtccatcaatggcggcttcaccagctttctgcggcggaagtggaagtttaagaaagagcggaacaaggggtacaagcaccacgccgaggacgccctgatcattgccaacgccgatttcatcttcaaagagtggaagaaactggacaaggccaaaaaagtgatggaaaaccagatgttcgaggaaaagcaggccgagagcatgcccgagatcgaaaccgagcaggagtacaaagagatcttcatcaccccccaccagatcaagcacattaaggacttcaaggactacaagtacagccaccgggtggacaagaagcctaatagagagctgattaacgacaccctgtactccacccggaaggacgacaagggcaacaccctgatcgtgaacaatctgaacggcctgtacgacaaggacaatgacaagctgaaaaagctgatcaacaagagccccgaaaagctgctgatgtaccaccacgacccccagacctaccagaaactgaagctgattatggaacagtacggcgacgagaagaatcccctgtacaagtactacgaggaaaccgggaactacctgaccaagtactccaaaaaggacaacggccccgtgatcaagaagattaagtattacggcaacaaactgaacgcccatctggacatcaccgacgactaccccaacagcagaaacaaggtcgtgaagctgtccctgaagccctacagattcgacgtgtacctggacaatggcgtgtacaagttcgtgaccgtgaagaatctggatgtgatcaaaaaagaaaactactacgaagtgaatagcaagtgctatgaggaagctaagaagctgaagaagatcagcaaccaggccgagtttatcgcctccttctacaacaacgatctgatcaagatcaacggcgagctgtatagagtgatcggcgtgaacaacgacctgctgaaccggatcgaagtgaacatgatcgacatcacctaccgcgagtacctggaaaacatgaacgacaagaggccccccaggatcattaagacaatcgcctccaagacccagagcattaagaagtacagcacagacattctgggcaacctgtatgaagtgaaatctaagaagcaccctcagatcatcaaaaagggcaaaaggccggcggccacgaaaaaggccggccaggcaaaaaagaaaaagggatccggacgggctgacgcattggacgattttgatctggatatgctgggaagtgacgccctcgatgattttgaccttgacatgcttggttcggatgcccttgatgactttgacctcgacatgctcggcagtgacgcccttgatgatttcgacctggacatgctgattaactgtacaggcagtggagagggcagaggaagtctgctaacatgcggtgacgtcgaggagaatcctggcccaatggccaagcctttgtctcaagaagaatccaccctcattgaaagagcaacggctacaatcaacagcatccccatctctgaagactacagcgtcgccagcgcagctctctctagcgacggccgcatcttcactggtgtcaatgtatatcattttactgggggaccttgtgcagaactcgtggtgctgggcactgctgctgctgcggcagctggcaacctgacttgtatcgtcgcgatcggaaatgagaacaggggcatcttgagcccctgcggacggtgccgacaggtgcttctcgatctgcatcctgggatcaaagccatagtgaaggacagtgatggacagccgacggcagttgggattcgtgaattgctgccctctggttatgtgtgggagggctaagaattcctagagctcgctgatcagcctcgactgtgccttctagttgccagccatctgttgtttgcccctcccccgtgccttccttgaccctggaaggtgccactcccactgtcctttcctaataaaatgaggaaattgcatcgcattgtctgagtaggtgtcattctattctggggggtggggtggggcaggacagcaagggggaggattgggaagagaatagcaggcatgctggggaggtaccgagggcctatttcccatgattccttcatatttgcatatacgatacaaggctgttagagagataattggaattaatttgactgtaaacacaaagatattagtacaaaatacgtgacgtagaaagtaataatttcttgggtagtttgcagttttaaaattatgttttaaaatggactatcatatgcttaccgtaacttgaaagtatttcgatttcttggctttatatatcttgtggaaaggacgaaacacctactagccacaatagagccaggttttagtactctggaaacagaatctactaaaacaaggcaaaatgccgtgtttatctcgtcaacttgttggcgagatttttgcggccgcaggaacccctagtgatggagttggccactccctctctgcgcgctcgctcgctcactgaggccgggcgaccaaaggtcgcccgacgcccgggctttgcccgggcggcctcagtgagcgagcgagcgcgcagctgcctgcaggggcgcctgatgcggtattttctccttacgcatctgtgcggtatttcacaccgcatacgtcaaagcaaccatagtacgcgccctgtagcggcgcattaagcgcggcgggtgtggtggttacgcgcagcgtgaccgctacacttgccagcgccttagcgcccgctcctttcgctttcttcccttcctttctcgccacgttcgccggctttccccgtcaagctctaaatcgggggctccctttagggttccgatttagtgctttacggcacctcgaccccaaaaaacttgatttgggtgatggttcacgtagtgggccatcgccctgatagacggtttttcgccctttgacgttggagtccacgttctttaatagtggactcttgttccaaactggaacaacactcaactctatctcgggctattcttttgatttataagggattttgccgatttcggtctattggttaaaaaatgagctgatttaacaaaaatttaacgcgaattttaacaaaatattaacgtttacaattttatggtgcactctcagtacaatctgctctgatgccgcatagttaagccagccccgacacccgccaacacccgctgacgcgccctgacgggcttgtctgctcccggcatccgcttacagacaagctgtgaccgtctccgggagctgcatgtgtcagaggttttcaccgtcatcaccgaaacgcgcgagacgaaagggcctcgtgatacgcctatttttataggttaatgtcatgataataatggtttcttagacgtcaggtggcacttttcggggaaatgtgcgcggaacccctatttgtttatttttctaaatacattcaaatatgtatccgctcatgagacaataaccctgataaatgcttcaataatattgaaaaaggaagagtatgagtattcaacatttccgtgtcgcccttattcccttttttgcggcattttgccttcctgtttttgctcacccagaaacgctggtgaaagtaaaagatgctgaagatcagttgggtgcacgagtgggttacatcgaactggatctcaacagcggtaagatccttgagagttttcgccccgaagaacgttttccaatgatgagcacttttaaagttctgctatgtggcgcggtattatcccgtattgacgccgggcaagagcaactcggtcgccgcatacactattctcagaatgacttggttgagtactcaccagtcacagaaaagcatcttacggatggcatgacagtaagagaattatgcagtgctgccataaccatgagtgataacactgcggccaacttacttctgacaacgatcggaggaccgaaggagctaaccgcttttttgcacaacatgggggatcatgtaactcgccttgatcgttgggaaccggagctgaatgaagccataccaaacgacgagcgtgacaccacgatgcctgtagcaatggcaacaacgttgcgcaaactattaactggcgaactacttactctagcttcccggcaacaattaatagactggatggaggcggataaagttgcaggaccacttctgcgctcggcccttccggctggctggtttattgctgataaatctggagccggtgagcgtggaagccgcggtatcattgcagcactggggccagatggtaagccctcccgtatcgtagttatctacacgacggggagtcaggcaactatggatgaacgaaatagacagatcgctgagataggtgcctcactgattaagcattggtaactgtcagaccaagtttactcatatatactttagattgatttaaaacttcatttttaatttaaaaggatctaggtgaagatcctttttgataatctcatgaccaaaatcccttaacgtgagttttcgttccactgagcgtcagaccccgtagaaaagatcaaaggatcttcttgagatcctttttttctgcgcgtaatctgctgcttgcaaacaaaaaaaccaccgctaccagcggtggtttgtttgccggatcaagagctaccaactctttttccgaaggtaactggcttcagcagagcgcagataccaaatactgttcttctagtgtagccgtagttaggccaccacttcaagaactctgtagcaccgcctacatacctcgctctgctaatcctgttaccagtggctgctgccagtggcgataagtcgtgtcttaccgggttggactcaagacgatagttaccggataaggcgcagcggtcgggctgaacggggggttcgtgcacacagcccagcttggagcgaacgacctacaccgaactgagatacctacagcgtgagctatgagaaagcgccacgcttcccgaagggagaaaggcggacaggtatccggtaagcggcagggtcggaacaggagagcgcacgagggagcttccagggggaaacgcctggtatctttatagtcctgtcgggtttcgccacctctgacttgagcgtcgatttttgtgatgctcgtcaggggggcggagcctatggaaaaacgccagcaacgcggcctttttacggttcctggccttttgctggccttttgctcacatgt

SEQ ID NO: 63 - RNA, 21 nt, synthetic construct
  source 1..21: mol_type = other RNA
ccgccgccgccaagctggcca

SEQ ID NO: 64 - RNA, 21 nt, synthetic construct
  source 1..21: mol_type = other RNA
gccccagccggcccctttaat

SEQ ID NO: 65 - RNA, 21 nt, synthetic construct
  source 1..21: mol_type = other RNA
cccgcagcgaactcgaattaa

SEQ ID NO: 66 - RNA, 7997 nt, synthetic construct
  source 1..7997: mol_type = other RNA
cctgcaggcagctgcgcgctcgctcgctcactgaggccgcccgggcgtcgggcgacctttggtcgcccggcctcagtgagcgagcgagcgcgcagagagggagtggccaactccatcactaggggttcctgcggcctctagactcgaggcgttgacattgattattgactagttattaatagtaatcaattacggggtcattagttcatagcccatatatggagttccgcgttacataacttacggtaaatggcccgcctggctgaccgcccaacgacccccgcccattgacgtcaataatgacgtatgttcccatagtaacgccaatagggactttccattgacgtcaatgggtggagtatttacggtaaactgcccacttggcagtacatcaagtgtatcatatgccaagtacgccccctattgacgtcaatgacggtaaatggcccgcctggcattatgcccagtacatgaccttatgggactttcctacttggcagtacatctacgtattagtcatcgctattaccatggtgatgcggttttggcagtacatcaatgggcgtggatagcggtttgactcacggggatttccaagtctccaccccattgacgtcaatgggagtttgttttggcaccaaaatcaacgggactttccaaaatgtcgtaacaactccgccccattgacgcaaatgggcggtaggcgtgtacggtgggaggtctatataagcagagctctctggctaactaccggtgccaccatggccccaaagaagaagcggaaggtcggtatccacggagtcccagcagccaagcggaactacatcctgggcctggccatcggcatcaccagcgtgggctacggcatcatcgactacgagacacgggacgtgatcgatgccggcgtgcggctgttcaaagaggccaacgtggaaaacaacgagggcaggcggagcaagagaggcgccagaaggctgaagcggcggaggcggcatagaatccagagagtgaagaagctgctgttcgactacaacctgctgaccgaccacagcgagctgagcggcatcaacccctacgaggccagagtgaagggcctgagccagaagctgagcgaggaagagttctctgccgccctgctgcacctggccaagagaagaggcgtgcacaacgtgaacgaggtggaagaggacaccggcaacgagctgtccaccaaagagcagatcagccggaacagcaaggccctggaagagaaatacgtggccgaactgcagctggaacggctgaagaaagacggcgaagtgcggggcagcatcaacagattcaagaccagcgactacgtgaaagaagccaaacagctgctgaaggtgcagaaggcctaccaccagctggaccagagcttcatcgacacctacatcgacctgctggaaacccggcggacctactatgagggacctggcgagggcagccccttcggctggaaggacatcaaagaatggtacgagatgctgatgggccactgcacctacttccccgaggaactgcggagcgtgaagtacgcctacaacgccgacctgtacaacgccctgaacgacctgaacaatctcgtgatcaccagggacgagaacgagaagctggaatattacgagaagttccagatcatcgagaacgtgttcaagcagaagaagaagcccaccctgaagcagatcgccaaagaaatcctcgtgaacgaagaggatattaagggctacagagtgaccagcaccggcaagcccgagttcaccaacctgaaggtgtaccacgacatcaaggacattaccgcccggaaagagattattgagaacgccgagctgctggatcagattgccaagatcctgaccatctaccagagcagcgaggacatccaggaagaactgaccaatctgaactccgagctgacccaggaagagatcgagcagatctctaatctgaagggctataccggcacccacaacctgagcctgaaggccatcaacctgatcctggacgagctgtggcacaccaacgacaaccagatcgctatcttcaaccggctgaagctggtgcccaagaaggtggacctgtcccagcagaaagagatccccaccaccctggtggacgacttcatcctgagccccgtcgtgaagagaagcttcatccagagcatcaaagtgatcaacgccatcatcaagaagtacggcctgcccaacgacatcattatcgagctggcccgcgagaagaactccaaggacgcccagaaaatgatcaacgagatgcagaagcggaaccggcagaccaacgagcggatcgaggaaatcatccggaccaccggcaaagagaacgccaagtacctgatcgagaagatcaagctgcacgacatgcaggaaggcaagtgcctgtacagcctggaagccatccctctggaagatctgctgaacaaccccttcaactatgaggtggaccacatcatccccagaagcgtgtccttcgacaacagcttcaacaacaaggtgctcgtgaagcaggaagaagccagcaagaagggcaaccggaccccattccagtacctgagcagcagcgacagcaagatcagctacgaaaccttcaagaagcacatcctgaatctggccaagggcaagggcagaatcagcaagaccaagaaagagtatctgctggaagaacgggacatcaacaggttctccgtgcagaaagacttcatcaaccggaacctggtggataccagatacgccaccagaggcctgatgaacctgctgcggagctacttcagagtgaacaacctggacgtgaaagtgaagtccatcaatggcggcttcaccagctttctgcggcggaagtggaagtttaagaaagagcggaacaaggggtacaagcaccacgccgaggacgccctgatcattgccaacgccgatttcatcttcaaagagtggaagaaactggacaaggccaaaaaagtgatggaaaaccagatgttcgaggaaaagcaggccgagagcatgcccgagatcgaaaccgagcaggagtacaaagagatcttcatcaccccccaccagatcaagcacattaaggacttcaaggactacaagtacagccaccgggtggacaagaagcctaatagagagctgattaacgacaccctgtactccacccggaaggacgacaagggcaacaccctgatcgtgaacaatctgaacggcctgtacgacaaggacaatgacaagctgaaaaagctgatcaacaagagccccgaaaagctgctgatgtaccaccacgacccccagacctaccagaaactgaagctgattatggaacagtacggcgacgagaagaatcccctgtacaagtactacgaggaaaccgggaactacctgaccaagtactccaaaaaggacaacggccccgtgatcaagaagattaagtattacggcaacaaactgaacgcccatctggacatcaccgacgactaccccaacagcagaaacaaggtcgtgaagctgtccctgaagccctacagattcgacgtgtacctggacaatggcgtgtacaagttcgtgaccgtgaagaatctggatgtgatcaaaaaagaaaactactacgaagtgaatagcaagtgctatgaggaagctaagaagctgaagaagatcagcaaccaggccgagtttatcgcctccttctacaacaacgatctgatcaagatcaacggcgagctgtatagagtgatcggcgtgaacaacgacctgctgaaccggatcgaagtgaacatgatcgacatcacctaccgcgagtacctggaaaacatgaacgacaagaggccccccaggatcattaagacaatcgcctccaagacccagagcattaagaagtacagcacagacattctgggcaacctgtatgaagtgaaatctaagaagcaccctcagatcatcaaaaagggcaaaaggccggcggccacgaaaaaggccggccaggcaaaaaagaaaaagggatccggacgggctgacgcattggacgattttgatctggatatgctgggaagtgacgccctcgatgattttgaccttgacatgcttggttcggatgcccttgatgactttgacctcgacatgctcggcagtgacgcccttgatgatttcgacctggacatgctgattaactgtacaggcagtggagagggcagaggaagtctgctaacatgcggtgacgtcgaggagaatcctggcccaatggccaagcctttgtctcaagaagaatccaccctcattgaaagagcaacggctacaatcaacagcatccccatctctgaagactacagcgtcgccagcgcagctctctctagcgacggccgcatcttcactggtgtcaatgtatatcattttactgggggaccttgtgcagaactcgtggtgctgggcactgctgctgctgcggcagctggcaacctgacttgtatcgtcgcgatcggaaatgagaacaggggcatcttgagcccctgcggacggtgccgacaggtgcttctcgatctgcatcctgggatcaaagccatagtgaaggacagtgatggacagccgacggcagttgggattcgtgaattgctgccctctggttatgtgtgggagggctaagaattcctagagctcgctgatcagcctcgactgtgccttctagttgccagccatctgttgtttgcccctcccccgtgccttccttgaccctggaaggtgccactcccactgtcctttcctaataaaatgaggaaattgcatcgcattgtctgagtaggtgtcattctattctggggggtggggtggggcaggacagcaagggggaggattgggaagagaatagcaggcatgctggggaggtaccgagggcctatttcccatgattccttcatatttgcatatacgatacaaggctgttagagagataattggaattaatttgactgtaaacacaaagatattagtacaaaatacgtgacgtagaaagtaataatttcttgggtagtttgcagttttaaaattatgttttaaaatggactatcatatgcttaccgtaacttgaaagtatttcgatttcttggctttatatatcttgtggaaaggacgaaacaccgccgccgccgccaagctggccagttttagtactctggaaacagaatctactaaaacaaggcaaaatgccgtgtttatctcgtcaacttgttggcgagatttttgcggccgcaggaacccctagtgatggagttggccactccctctctgcgcgctcgctcgctcactgaggccgggcgaccaaaggtcgcccgacgcccgggctttgcccgggcggcctcagtgagcgagcgagcgcgcagctgcctgcaggggcgcctgatgcggtattttctccttacgcatctgtgcggtatttcacaccgcatacgtcaaagcaaccatagtacgcgccctgtagcggcgcattaagcgcggcgggtgtggtggttacgcgcagcgtgaccgctacacttgccagcgccttagcgcccgctcctttcgctttcttcccttcctttctcgccacgttcgccggctttccccgtcaagctctaaatcgggggctccctttagggttccgatttagtgctttacggcacctcgaccccaaaaaacttgatttgggtgatggttcacgtagtgggccatcgccctgatagacggtttttcgccctttgacgttggagtccacgttctttaatagtggactcttgttccaaactggaacaacactcaactctatctcgggctattcttttgatttataagggattttgccgatttcggtctattggttaaaaaatgagctgatttaacaaaaatttaacgcgaattttaacaaaatattaacgtttacaattttatggtgcactctcagtacaatctgctctgatgccgcatagttaagccagccccgacacccgccaacacccgctgacgcgccctgacgggcttgtctgctcccggcatccgcttacagacaagctgtgaccgtctccgggagctgcatgtgtcagaggttttcaccgtcatcaccgaaacgcgcgagacgaaagggcctcgtgatacgcctatttttataggttaatgtcatgataataatggtttcttagacgtcaggtggcacttttcggggaaatgtgcgcggaacccctatttgtttatttttctaaatacattcaaatatgtatccgctcatgagacaataaccctgataaatgcttcaataatattgaaaaaggaagagtatgagtattcaacatttccgtgtcgcccttattcccttttttgcggcattttgccttcctgtttttgctcacccagaaacgctggtgaaagtaaaagatgctgaagatcagttgggtgcacgagtgggttacatcgaactggatctcaacagcggtaagatccttgagagttttcgccccgaagaacgttttccaatgatgagcacttttaaagttctgctatgtggcgcggtattatcccgtattgacgccgggcaagagcaactcggtcgccgcatacactattctcagaatgacttggttgagtactcaccagtcacagaaaagcatcttacggatggcatgacagtaagagaattatgcagtgctgccataaccatgagtgataacactgcggccaacttacttctgacaacgatcggaggaccgaaggagctaaccgcttttttgcacaacatgggggatcatgtaactcgccttgatcgttgggaaccggagctgaatgaagccataccaaacgacgagcgtgacaccacgatgcctgtagcaatggcaacaacgttgcgcaaactattaactggcgaactacttactctagcttcccggcaacaattaatagactggatggaggcggataaagttgcaggaccacttctgcgctcggcccttccggctggctggtttattgctgataaatctggagccggtgagcgtggaagccgcggtatcattgcagcactggggccagatggtaagccctcccgtatcgtagttatctacacgacggggagtcaggcaactatggatgaacgaaatagacagatcgctgagataggtgcctcactgattaagcattggtaactgtcagaccaagtttactcatatatactttagattgatttaaaacttcatttttaatttaaaaggatctaggtgaagatcctttttgataatctcatgaccaaaatcccttaacgtgagttttcgttccactgagcgtcagaccccgtagaaaagatcaaaggatcttcttgagatcctttttttctgcgcgtaatctgctgcttgcaaacaaaaaaaccaccgctaccagcggtggtttgtttgccggatcaagagctaccaactctttttccgaaggtaactggcttcagcagagcgcagataccaaatactgttcttctagtgtagccgtagttaggccaccacttcaagaactctgtagcaccgcctacatacctcgctctgctaatcctgttaccagtggctgctgccagtggcgataagtcgtgtcttaccgggttggactcaagacgatagttaccggataaggcgcagcggtcgggctgaacggggggttcgtgcacacagcccagcttggagcgaacgacctacaccgaactgagatacctacagcgtgagctatgagaaagcgccacgcttcccgaagggagaaaggcggacaggtatccggtaagcggcagggtcggaacaggagagcgcacgagggagcttccagggggaaacgcctggtatctttatagtcctgtcgggtttcgccacctctgacttgagcgtcgatttttgtgatgctcgtcaggggggcggagcctatggaaaaacgccagcaacgcggcctttttacggttcctggccttttgctggccttttgctcacatgt

SEQ ID NO: 67 - RNA, 7996 nt, synthetic construct
  source 1..7996: mol_type = other RNA
cctgcaggcagctgcgcgctcgctcgctcactgaggccgcccgggcgtcgggcgacctttggtcgcccggcctcagtgagcgagcgagcgcgcagagagggagtggccaactccatcactaggggttcctgcggcctctagactcgaggcgttgacattgattattgactagttattaatagtaatcaattacggggtcattagttcatagcccatatatggagttccgcgttacataacttacggtaaatggcccgcctggctgaccgcccaacgacccccgcccattgacgtcaataatgacgtatgttcccatagtaacgccaatagggactttccattgacgtcaatgggtggagtatttacggtaaactgcccacttggcagtacatcaagtgtatcatatgccaagtacgccccctattgacgtcaatgacggtaaatggcccgcctggcattatgcccagtacatgaccttatgggactttcctacttggcagtacatctacgtattagtcatcgctattaccatggtgatgcggttttggcagtacatcaatgggcgtggatagcggtttgactcacggggatttccaagtctccaccccattgacgtcaatgggagtttgttttggcaccaaaatcaacgggactttccaaaatgtcgtaacaactccgccccattgacgcaaatgggcggtaggcgtgtacggtgggaggtctatataagcagagctctctggctaactaccggtgccaccatggccccaaagaagaagcggaaggtcggtatccacggagtcccagcagccaagcggaactacatcctgggcctggccatcggcatcaccagcgtgggctacggcatcatcgactacgagacacgggacgtgatcgatgccggcgtgcggctgttcaaagaggccaacgtggaaaacaacgagggcaggcggagcaagagaggcgccagaaggctgaagcggcggaggcggcatagaatccagagagtgaagaagctgctgttcgactacaacctgctgaccgaccacagcgagctgagcggcatcaacccctacgaggccagagtgaagggcctgagccagaagctgagcgaggaagagttctctgccgccctgctgcacctggccaagagaagaggcgtgcacaacgtgaacgaggtggaagaggacaccggcaacgagctgtccaccaaagagcagatcagccggaacagcaaggccctggaagagaaatacgtggccgaactgcagctggaacggctgaagaaagacggcgaagtgcggggcagcatcaacagattcaagaccagcgactacgtgaaagaagccaaacagctgctgaaggtgcagaaggcctaccaccagctggaccagagcttcatcgacacctacatcgacctgctggaaacccggcggacctactatgagggacctggcgagggcagccccttcggctggaaggacatcaaagaatggtacgagatgctgatgggccactgcacctacttccccgaggaactgcggagcgtgaagtacgcctacaacgccgacctgtacaacgccctgaacgacctgaacaatctcgtgatcaccagggacgagaacgagaagctggaatattacgagaagttccagatcatcgagaacgtgttcaagcagaagaagaagcccaccctgaagcagatcgccaaagaaatcctcgtgaacgaagaggatattaagggctacagagtgaccagcaccggcaagcccgagttcaccaacctgaaggtgtaccacgacatcaaggacattaccgcccggaaagagattattgagaacgccgagctgctggatcagattgccaagatcctgaccatctaccagagcagcgaggacatccaggaagaactgaccaatctgaactccgagctgacccaggaagagatcgagcagatctctaatctgaagggctataccggcacccacaacctgagcctgaaggccatcaacctgatcctggacgagctgtggcacaccaacgacaaccagatcgctatcttcaaccggctgaagctggtgcccaagaaggtggacctgtcccagcagaaagagatccccaccaccctggtggacgacttcatcctgagccccgtcgtgaagagaagcttcatccagagcatcaaagtgatcaacgccatcatcaagaagtacggcctgcccaacgacatcattatcgagctggcccgcgagaagaactccaaggacgcccagaaaatgatcaacgagatgcagaagcggaaccggcagaccaacgagcggatcgaggaaatcatccggaccaccggcaaagagaacgccaagtacctgatcgagaagatcaagctgcacgacatgcaggaaggcaagtgcctgtacagcctggaagccatccctctggaagatctgctgaacaaccccttcaactatgaggtggaccacatcatccccagaagcgtgtccttcgacaacagcttcaacaacaaggtgctcgtgaagcaggaagaagccagcaagaagggcaaccggaccccattccagtacctgagcagcagcgacagcaagatcagctacgaaaccttcaagaagcacatcctgaatctggccaagggcaagggcagaatcagcaagaccaagaaagagtatctgctggaagaacgggacatcaacaggttctccgtgcagaaagacttcatcaaccggaacctggtggataccagatacgccaccagaggcctgatgaacctgctgcggagctacttcagagtgaacaacctggacgtgaaagtgaagtccatcaatggcggcttcaccagctttctgcggcggaagtggaagtttaagaaagagcggaacaaggggtacaagcaccacgccgaggacgccctgatcattgccaacgccgatttcatcttcaaagagtggaagaaactggacaaggccaaaaaagtgatggaaaaccagatgttcgaggaaaagcaggccgagagcatgcccgagatcgaaaccgagcaggagtacaaagagatcttcatcaccccccaccagatcaagcacattaaggacttcaaggactacaagtacagccaccgggtggacaagaagcctaatagagagctgattaacgacaccctgtactccacccggaaggacgacaagggcaacaccctgatcgtgaacaatctgaacggcctgtacgacaaggacaatgacaagctgaaaaagctgatcaacaagagccccgaaaagctgctgatgtaccaccacgacccccagacctaccagaaactgaagctgattatggaacagtacggcgacgagaagaatcccctgtacaagtactacgaggaaaccgggaactacctgaccaagtactccaaaaaggacaacggccccgtgatcaagaagattaagtattacggcaacaaactgaacgcccatctggacatcaccgacgactaccccaacagcagaaacaaggtcgtgaagctgtccctgaagccctacagattcgacgtgtacctggacaatggcgtgtacaagttcgtgaccgtgaagaatctggatgtgatcaaaaaagaaaactactacgaagtgaatagcaagtgctatgaggaagctaagaagctgaagaagatcagcaaccaggccgagtttatcgcctccttctacaacaacgatctgatcaagatcaacggcgagctgtatagagtgatcggcgtgaacaacgacctgctgaaccggatcgaagtgaacatgatcgacatcacctaccgcgagtacctggaaaacatgaacgacaagaggccccccaggatcattaagacaatcgcctccaagacccagagcattaagaagtacagcacagacattctgggcaacctgtatgaagtgaaatctaagaagcaccctcagatcatcaaaaagggcaaaaggccggcggccacgaaaaaggccggccaggcaaaaaagaaaaagggatccggacgggctgacgcattggacgattttgatctggatatgctgggaagtgacgccctcgatgattttgaccttgacatgcttggttcggatgcccttgatgactttgacctcgacatgctcggcagtgacgcccttgatgatttcgacctggacatgctgattaactgtacaggcagtggagagggcagaggaagtctgctaacatgcggtgacgtcgaggagaatcctggcccaatggccaagcctttgtctcaagaagaatccaccctcattgaaagagcaacggctacaatcaacagcatccccatctctgaagactacagcgtcgccagcgcagctctctctagcgacggccgcatcttcactggtgtcaatgtatatcattttactgggggaccttgtgcagaactcgtggtgctgggcactgctgctgctgcggcagctggcaacctgacttgtatcgtcgcgatcggaaatgagaacaggggcatcttgagcccctgcggacggtgccgacaggtgcttctcgatctgcatcctgggatcaaagccatagtgaaggacagtgatggacagccgacggcagttgggattcgtgaattgctgccctctggttatgtgtgggagggctaagaattcctagagctcgctgatcagcctcgactgtgccttctagttgccagccatctgttgtttgcccctcccccgtgccttccttgaccctggaaggtgccactcccactgtcctttcctaataaaatgaggaaattgcatcgcattgtctgagtaggtgtcattctattctggggggtggggtggggcaggacagcaagggggaggattgggaagagaatagcaggcatgctggggaggtaccgagggcctatttcccatgattccttcatatttgcatatacgatacaaggctgttagagagataattggaattaatttgactgtaaacacaaagatattagtacaaaatacgtgacgtagaaagtaataatttcttgggtagtttgcagttttaaaattatgttttaaaatggactatcatatgcttaccgtaacttgaaagtatttcgatttcttggctttatatatcttgtggaaaggacgaaacaccgccccagccggcccctttaatgttttagtactctggaaacagaatctactaaaacaaggcaaaatgccgtgtttatctcgtcaacttgttggcgagatttttgcggccgcaggaacccctagtgatggagttggccactccctctctgcgcgctcgctcgctcactgaggccgggcgaccaaaggtcgcccgacgcccgggctttgcccgggcggcctcagtgagcgagcgagcgcgcagctgcctgcaggggcgcctgatgcggtattttctccttacgcatctgtgcggtatttcacaccgcatacgtcaaagcaaccatagtacgcgccctgtagcggcgcattaagcgcggcgggtgtggtggttacgcgcagcgtgaccgctacacttgccagcgccttagcgcccgctcctttcgctttcttcccttcctttctcgccacgttcgccggctttccccgtcaagctctaaatcgggggctccctttagggttccgatttagtgctttacggcacctcgaccccaaaaaacttgatttgggtgatggttcacgtagtgggccatcgccctgatagacggtttttcgccctttgacgttggagtccacgttctttaatagtggactcttgttccaaactggaacaacactcaactctatctcgggctattcttttgatttataagggattttgccgatttcggtctattggttaaaaaatgagctgatttaacaaaaatttaacgcgaattttaacaaaatattaacgtttacaattttatggtgcactctcagtacaatctgctctgatgccgcatagttaagccagccccgacacccgccaacacccgctgacgcgccctgacgggcttgtctgctcccggcatccgcttacagacaagctgtgaccgtctccgggagctgcatgtgtcagaggttttcaccgtcatcaccgaaacgcgcgagacgaaagggcctcgtgatacgcctatttttataggttaatgtcatgataataatggtttcttagacgtcaggtggcacttttcggggaaatgtgcgcggaacccctatttgtttatttttctaaatacattcaaatatgtatccgctcatgagacaataaccctgataaatgcttcaataatattgaaaaaggaagagtatgagtattcaacatttccgtgtcgcccttattcccttttttgcggcattttgccttcctgtttttgctcacccagaaacgctggtgaaagtaaaagatgctgaagatcagttgggtgcacgagtgggttacatcgaactggatctcaacagcggtaagatccttgagagttttcgccccgaagaacgttttccaatgatgagcacttttaaagttctgctatgtggcgcggtattatcccgtattgacgccgggcaagagcaactcggtcgccgcatacactattctcagaatgacttggttgagtactcaccagtcacagaaaagcatcttacggatggcatgacagtaagagaattatgcagtgctgccataaccatgagtgataacactgcggccaacttacttctgacaacgatcggaggaccgaaggagctaaccgcttttttgcacaacatgggggatcatgtaactcgccttgatcgttgggaaccggagctgaatgaagccataccaaacgacgagcgtgacaccacgatgcctgtagcaatggcaacaacgttgcgcaaactattaactggcgaactacttactctagcttcccggcaacaattaatagactggatggaggcggataaagttgcaggaccacttctgcgctcggcccttccggctggctggtttattgctgataaatctggagccggtgagcgtggaagccgcggtatcattgcagcactggggccagatggtaagccctcccgtatcgtagttatctacacgacggggagtcaggcaactatggatgaacgaaatagacagatcgctgagataggtgcctcactgattaagcattggtaactgtcagaccaagtttactcatatatactttagattgatttaaaacttcatttttaatttaaaaggatctaggtgaagatcctttttgataatctcatgaccaaaatcccttaacgtgagttttcgttccactgagcgtcagaccccgtagaaaagatcaaaggatcttcttgagatcctttttttctgcgcgtaatctgctgcttgcaaacaaaaaaaccaccgctaccagcggtggtttgtttgccggatcaagagctaccaactctttttccgaaggtaactggcttcagcagagcgcagataccaaatactgttcttctagtgtagccgtagttaggccaccacttcaagaactctgtagcaccgcctacatacctcgctctgctaatcctgttaccagtggctgctgccagtggcgataagtcgtgtcttaccgggttggactcaagacgatagttaccggataaggcgcagcggtcgggctgaacggggggttcgtgcacacagcccagcttggagcgaacgacctacaccgaactgagatacctacagcgtgagctatgagaaagcgccacgcttcccgaagggagaaaggcggacaggtatccggtaagcggcagggtcggaacaggagagcgcacgagggagcttccagggggaaacgcctggtatctttatagtcctgtcgggtttcgccacctctgacttgagcgtcgatttttgtgatgctcgtcaggggggcggagcctatggaaaaacgccagcaacgcggcctttttacggttcctggccttttgctggccttttgctcacatgt

SEQ ID NO: 68 - RNA, 7997 nt, synthetic construct
  source 1..7997: mol_type = other RNA
cctgcaggcagctgcgcgctcgctcgctcactgaggccgcccgggcgtcgggcgacctttggtcgcccggcctcagtgagcgagcgagcgcgcagagagggagtggccaactccatcactaggggttcctgcggcctctagactcgaggcgttgacattgattattgactagttattaatagtaatcaattacggggtcattagttcatagcccatatatggagttccgcgttacataacttacggtaaatggcccgcctggctgaccgcccaacgacccccgcccattgacgtcaataatgacgtatgttcccatagtaacgccaatagggactttccattgacgtcaatgggtggagtatttacggtaaactgcccacttggcagtacatcaagtgtatcatatgccaagtacgccccctattgacgtcaatgacggtaaatggcccgcctggcattatgcccagtacatgaccttatgggactttcctacttggcagtacatctacgtattagtcatcgctattaccatggtgatgcggttttggcagtacatcaatgggcgtggatagcggtttgactcacggggatttccaagtctccaccccattgacgtcaatgggagtttgttttggcaccaaaatcaacgggactttccaaaatgtcgtaacaactccgccccattgacgcaaatgggcggtaggcgtgtacggtgggaggtctatataagcagagctctctggctaactaccggtgccaccatggccccaaagaagaagcggaaggtcggtatccacggagtcccagcagccaagcggaactacatcctgggcctggccatcggcatcaccagcgtgggctacggcatcatcgactacgagacacgggacgtgatcgatgccggcgtgcggctgttcaaagaggccaacgtggaaaacaacgagggcaggcggagcaagagaggcgccagaaggctgaagcggcggaggcggcatagaatccagagagtgaagaagctgctgttcgactacaacctgctgaccgaccacagcgagctgagcggcatcaacccctacgaggccagagtgaagggcctgagccagaagctgagcgaggaagagttctctgccgccctgctgcacctggccaagagaagaggcgtgcacaacgtgaacgaggtggaagaggacaccggcaacgagctgtccaccaaagagcagatcagccggaacagcaaggccctggaagagaaatacgtggccgaactgcagctggaacggctgaagaaagacggcgaagtgcggggcagcatcaacagattcaagaccagcgactacgtgaaagaagccaaacagctgctgaaggtgcagaaggcctaccaccagctggaccagagcttcatcgacacctacatcgacctgctggaaacccggcggacctactatgagggacctggcgagggcagccccttcggctggaaggacatcaaagaatggtacgagatgctgatgggccactgcacctacttccccgaggaactgcggagcgtgaagtacgcctacaacgccgacctgtacaacgccctgaacgacctgaacaatctcgtgatcaccagggacgagaacgagaagctggaatattacgagaagttccagatcatcgagaacgtgttcaagcagaagaagaagcccaccctgaagcagatcgccaaagaaatcctcgtgaacgaagaggatattaagggctacagagtgaccagcaccggcaagcccgagttcaccaacctgaaggtgtaccacgacatcaaggacattaccgcccggaaagagattattgagaacgccgagctgctggatcagattgccaagatcctgaccatctaccagagcagcgaggacatccaggaagaactgaccaatctgaactccgagctgacccaggaagagatcgagcagatctctaatctgaagggctataccggcacccacaacctgagcctgaaggccatcaacctgatcctggacgagctgtggcacaccaacgacaaccagatcgctatcttcaaccggctgaagctggtgcccaagaaggtggacctgtcccagcagaaagagatccccaccaccctggtggacgacttcatcctgagccccgtcgtgaagagaagcttcatccagagcatcaaagtgatcaacgccatcatcaagaagtacggcctgcccaacgacatcattatcgagctggcccgcgagaagaactccaaggacgcccagaaaatgatcaacgagatgcagaagcggaaccggcagaccaacgagcggatcgaggaaatcatccggaccaccggcaaagagaacgccaagtacctgatcgagaagatcaagctgcacgacatgcaggaaggcaagtgcctgtacagcctggaagccatccctctggaagatctgctgaacaaccccttcaactatgaggtggaccacatcatccccagaagcgtgtccttcgacaacagcttcaacaacaaggtgctcgtgaagcaggaagaagccagcaagaagggcaaccggaccccattccagtacctgagcagcagcgacagcaagatcagctacgaaaccttcaagaagcacatcctgaatctggccaagggcaagggcagaatcagcaagaccaagaaagagtatctgctggaagaacgggacatcaacaggttctccgtgcagaaagacttcatcaaccggaacctggtggataccagatacgccaccagaggcctgatgaacctgctgcggagctacttcagagtgaacaacctggacgtgaaagtgaagtccatcaatggcggcttcaccagctttctgcggcggaagtggaagtttaagaaagagcggaacaaggggtacaagcaccacgccgaggacgccctgatcattgccaacgccgatttcatcttcaaagagtggaagaaactggacaaggccaaaaaagtgatggaaaaccagatgttcgaggaaaagcaggccgagagcatgcccgagatcgaaaccgagcaggagtacaaagagatcttcatcaccccccaccagatcaagcacattaaggacttcaaggactacaagtacagccaccgggtggacaagaagcctaatagagagctgattaacgacaccctgtactccacccggaaggacgacaagggcaacaccctgatcgtgaacaatctgaacggcctgtacgacaaggacaatgacaagctgaaaaagctgatcaacaagagccccgaaaagctgctgatgtaccaccacgacccccagacctaccagaaactgaagctgattatggaacagtacggcgacgagaagaatcccctgtacaagtactacgaggaaaccgggaactacctgaccaagtactccaaaaaggacaacggccccgtgatcaagaagattaagtattacggcaacaaactgaacgcccatctggacatcaccgacgactaccccaacagcagaaacaaggtcgtgaagctgtccctgaagccctacagattcgacgtgtacctggacaatggcgtgtacaagttcgtgaccgtgaagaatctggatgtgatcaaaaaagaaaactactacgaagtgaatagcaagtgctatgaggaagctaagaagctgaagaagatcagcaaccaggccgagtttatcgcctccttctacaacaacgatctgatcaagatcaacggcgagctgtatagagtgatcggcgtgaacaacgacctgctgaaccggatcgaagtgaacatgatcgacatcacctaccgcgagtacctggaaaacatgaacgacaagaggccccccaggatcattaagacaatcgcctccaagacccagagcattaagaagtacagcacagacattctgggcaacctgtatgaagtgaaatctaagaagcaccctcagatcatcaaaaagggcaaaaggccggcggccacgaaaaaggccggccaggcaaaaaagaaaaagggatccggacgggctgacgcattggacgattttgatctggatatgctgggaagtgacgccctcgatgattttgaccttgacatgcttggttcggatgcccttgatgactttgacctcgacatgctcggcagtgacgcccttgatgatttcgacctggacatgctgattaactgtacaggcagtggagagggcagaggaagtctgctaacatgcggtgacgtcgaggagaatcctggcccaatggccaagcctttgtctcaagaagaatccaccctcattgaaagagcaacggctacaatcaacagcatccccatctctgaagactacagcgtcgccagcgcagctctctctagcgacggccgcatcttcactggtgtcaatgtatatcattttactgggggaccttgtgcagaactcgtggtgctgggcactgctgctgctgcggcagctggcaacctgacttgtatcgtcgcgatcggaaatgagaacaggggcatcttgagcccctgcggacggtgccgacaggtgcttctcgatctgcatcctgggatcaaagccatagtgaaggacagtgatggacagccgacggcagttgggattcgtgaattgctgccctctggttatgtgtgggagggctaagaattcctagagctcgctgatcagcctcgactgtgccttctagttgccagccatctgttgtttgcccctcccccgtgccttccttgaccctggaaggtgccactcccactgtcctttcctaataaaatgaggaaattgcatcgcattgtctgagtaggtgtcattctattctggggggtggggtggggcaggacagcaagggggaggattgggaagagaatagcaggcatgctggggaggtaccgagggcctatttcccatgattccttcatatttgcatatacgatacaaggctgttagagagataattggaattaatttgactgtaaacacaaagatattagtacaaaatacgtgacgtagaaagtaataatttcttgggtagtttgcagttttaaaattatgttttaaaatggactatcatatgcttaccgtaacttgaaagtatttcgatttcttggctttatatatcttgtggaaaggacgaaacaccgcccgcagcgaactcgaattaagttttagtactctggaaacagaatctactaaaacaaggcaaaatgccgtgtttatctcgtcaacttgttggcgagatttttgcggccgcaggaacccctagtgatggagttggccactccctctctgcgcgctcgctcgctcactgaggccgggcgaccaaaggtcgcccgacgcccgggctttgcccgggcggcctcagtgagcgagcgagcgcgcagctgcctgcaggggcgcctgatgcggtattttctccttacgcatctgtgcggtatttcacaccgcatacgtcaaagcaaccatagtacgcgccctgtagcggcgcattaagcgcggcgggtgtggtggttacgcgcagcgtgaccgctacacttgccagcgccttagcgcccgctcctttcgctttcttcccttcctttctcgccacgttcgccggctttccccgtcaagctctaaatcgggggctccctttagggttccgatttagtgctttacggcacctcgaccccaaaaaacttgatttgggtgatggttcacgtagtgggccatcgccctgatagacggtttttcgccctttgacgttggagtccacgttctttaatagtggactcttgttccaaactggaacaacactcaactctatctcgggctattcttttgatttataagggattttgccgatttcggtctattggttaaaaaatgagctgatttaacaaaaatttaacgcgaattttaacaaaatattaacgtttacaattttatggtgcactctcagtacaatctgctctgatgccgcatagttaagccagccccgacacccgccaacacccgctgacgcgccctgacgggcttgtctgctcccggcatccgcttacagacaagctgtgaccgtctccgggagctgcatgtgtcagaggttttcaccgtcatcaccgaaacgcgcgagacgaaagggcctcgtgatacgcctatttttataggttaatgtcatgataataatggtttcttagacgtcaggtggcacttttcggggaaatgtgcgcggaacccctatttgtttatttttctaaatacattcaaatatgtatccgctcatgagacaataaccctgataaatgcttcaataatattgaaaaaggaagagtatgagtattcaacatttccgtgtcgcccttattcccttttttgcggcattttgccttcctgtttttgctcacccagaaacgctggtgaaagtaaaagatgctgaagatcagttgggtgcacgagtgggttacatcgaactggatctcaacagcggtaagatccttgagagttttcgccccgaagaacgttttccaatgatgagcacttttaaagttctgctatgtggcgcggtattatcccgtattgacgccgggcaagagcaactcggtcgccgcatacactattctcagaatgacttggttgagtactcaccagtcacagaaaagcatcttacggatggcatgacagtaagagaattatgcagtgctgccataaccatgagtgataacactgcggccaacttacttctgacaacgatcggaggaccgaaggagctaaccgcttttttgcacaacatgggggatcatgtaactcgccttgatcgttgggaaccggagctgaatgaagccataccaaacgacgagcgtgacaccacgatgcctgtagcaatggcaacaacgttgcgcaaactattaactggcgaactacttactctagcttcccggcaacaattaatagactggatggaggcggataaagttgcaggaccacttctgcgctcggcccttccggctggctggtttattgctgataaatctggagccggtgagcgtggaagccgcggtatcattgcagcactggggccagatggtaagccctcccgtatcgtagttatctacacgacggggagtcaggcaactatggatgaacgaaatagacagatcgctgagataggtgcctcactgattaagcattggtaactgtcagaccaagtttactcatatatactttagattgatttaaaacttcatttttaatttaaaaggatctaggtgaagatcctttttgataatctcatgaccaaaatcccttaacgtgagttttcgttccactgagcgtcagaccccgtagaaaagatcaaaggatcttcttgagatcctttttttctgcgcgtaatctgctgcttgcaaacaaaaaaaccaccgctaccagcggtggtttgtttgccggatcaagagctaccaactctttttccgaaggtaactggcttcagcagagcgcagataccaaatactgttcttctagtgtagccgtagttaggccaccacttcaagaactctgtagcaccgcctacatacctcgctctgctaatcctgttaccagtggctgctgccagtggcgataagtcgtgtcttaccgggttggactcaagacgatagttaccggataaggcgcagcggtcgggctgaacggggggttcgtgcacacagcccagcttggagcgaacgacctacaccgaactgagatacctacagcgtgagctatgagaaagcgccacgcttcccgaagggagaaaggcggacaggtatccggtaagcggcagggtcggaacaggagagcgcacgagggagcttccagggggaaacgcctggtatctttatagtcctgtcgggtttcgccacctctgacttgagcgtcgatttttgtgatgctcgtcaggggggcggagcctatggaaaaacgccagcaacgcggcctttttacggttcctggccttttgctggccttttgctcacatgt

SEQ ID NO: 69 - RNA, 21 nt, synthetic construct
  source 1..21: mol_type = other RNA
tgcctgagcgaggaacagctc

SEQ ID NO: 70 - RNA, 21 nt, synthetic construct
  source 1..21: mol_type = other RNA
cactgctgggggaagagacct

SEQ ID NO: 71 - RNA, 21 nt, synthetic construct
  source 1..21: mol_type = other RNA
gacctgtgaggtgctgcgagg

SEQ ID NO: 72 - RNA, 7997 nt, synthetic construct
  source 1..7997: mol_type = other RNA
cctgcaggcagctgcgcgctcgctcgctcactgaggccgcccgggcgtcgggcgacctttggtcgcccggcctcagtgagcgagcgagcgcgcagagagggagtggccaactccatcactaggggttcctgcggcctctagactcgaggcgttgacattgattattgactagttattaatagtaatcaattacggggtcattagttcatagcccatatatggagttccgcgttacataacttacggtaaatggcccgcctggctgaccgcccaacgacccccgcccattgacgtcaataatgacgtatgttcccatagtaacgccaatagggactttccattgacgtcaatgggtggagtatttacggtaaactgcccacttggcagtacatcaagtgtatcatatgccaagtacgccccctattgacgtcaatgacggtaaatggcccgcctggcattatgcccagtacatgaccttatgggactttcctacttggcagtacatctacgtattagtcatcgctattaccatggtgatgcggttttggcagtacatcaatgggcgtggatagcggtttgactcacggggatttccaagtctccaccccattgacgtcaatgggagtttgttttggcaccaaaatcaacgggactttccaaaatgtcgtaacaactccgccccattgacgcaaatgggcggtaggcgtgtacggtgggaggtctatataagcagagctctctggctaactaccggtgccaccatggccccaaagaagaagcggaaggtcggtatccacggagtcccagcagccaagcggaactacatcctgggcctggccatcggcatcaccagcgtgggctacggcatcatcgactacgagacacgggacgtgatcgatgccggcgtgcggctgttcaaagaggccaacgtggaaaacaacgagggcaggcggagcaagagaggcgccagaaggctgaagcggcggaggcggcatagaatccagagagtgaagaagctgctgttcgactacaacctgctgaccgaccacagcgagctgagcggcatcaacccctacgaggccagagtgaagggcctgagccagaagctgagcgaggaagagttctctgccgccctgctgcacctggccaagagaagaggcgtgcacaacgtgaacgaggtggaagaggacaccggcaacgagctgtccaccaaagagcagatcagccggaacagcaaggccctggaagagaaatacgtggccgaactgcagctggaacggctgaagaaagacggcgaagtgcggggcagcatcaacagattcaagaccagcgactacgtgaaagaagccaaacagctgctgaaggtgcagaaggcctaccaccagctggaccagagcttcatcgacacctacatcgacctgctggaaacccggcggacctactatgagggacctggcgagggcagccccttcggctggaaggacatcaaagaatggtacgagatgctgatgggccactgcacctacttccccgaggaactgcggagcgtgaagtacgcctacaacgccgacctgtacaacgccctgaacgacctgaacaatctcgtgatcaccagggacgagaacgagaagctggaatattacgagaagttccagatcatcgagaacgtgttcaagcagaagaagaagcccaccctgaagcagatcgccaaagaaatcctcgtgaacgaagaggatattaagggctacagagtgaccagcaccggcaagcccgagttcaccaacctgaaggtgtaccacgacatcaaggacattaccgcccggaaagagattattgagaacgccgagctgctggatcagattgccaagatcctgaccatctaccagagcagcgaggacatccaggaagaactgaccaatctgaactccgagctgacccaggaagagatcgagcagatctctaatctgaagggctataccggcacccacaacctgagcctgaaggccatcaacctgatcctggacgagctgtggcacaccaacgacaaccagatcgctatcttcaaccggctgaagctggtgcccaagaaggtggacctgtcccagcagaaagagatccccaccaccctggtggacgacttcatcctgagccccgtcgtgaagagaagcttcatccagagcatcaaagtgatcaacgccatcatcaagaagtacggcctgcccaacgacatcattatcgagctggcccgcgagaagaactccaaggacgcccagaaaatgatcaacgagatgcagaagcggaaccggcagaccaacgagcggatcgaggaaatcatccggaccaccggcaaagagaacgccaagtacctgatcgagaagatcaagctgcacgacatgcaggaaggcaagtgcctgtacagcctggaagccatccctctggaagatctgctgaacaaccccttcaactatgaggtggaccacatcatccccagaagcgtgtccttcgacaacagcttcaacaacaaggtgctcgtgaagcaggaagaagccagcaagaagggcaaccggaccccattccagtacctgagcagcagcgacagcaagatcagctacgaaaccttcaagaagcacatcctgaatctggccaagggcaagggcagaatcagcaagaccaagaaagagtatctgctggaagaacgggacatcaacaggttctccgtgcagaaagacttcatcaaccggaacctggtggataccagatacgccaccagaggcctgatgaacctgctgcggagctacttcagagtgaacaacctggacgtgaaagtgaagtccatcaatggcggcttcaccagctttctgcggcggaagtggaagtttaagaaagagcggaacaaggggtacaagcaccacgccgaggacgccctgatcattgccaacgccgatttcatcttcaaagagtggaagaaactggacaaggccaaaaaagtgatggaaaaccagatgttcgaggaaaagcaggccgagagcatgcccgagatcgaaaccgagcaggagtacaaagagatcttcatcaccccccaccagatcaagcacattaaggacttcaaggactacaagtacagccaccgggtggacaagaagcctaatagagagctgattaacgacaccctgtactccacccggaaggacgacaagggcaacaccctgatcgtgaacaatctgaacggcctgtacgacaaggacaatgacaagctgaaaaagctgatcaacaagagccccgaaaagctgctgatgtaccaccacgacccccagacctaccagaaactgaagctgattatggaacagtacggcgacgagaagaatcccctgtacaagtactacgaggaaaccgggaactacctgaccaagtactccaaaaaggacaacggccccgtgatcaagaagattaagtattacggcaacaaactgaacgcccatctggacatcaccgacgactaccccaacagcagaaacaaggtcgtgaagctgtccctgaagccctacagattcgacgtgtacctggacaatggcgtgtacaagttcgtgaccgtgaagaatctggatgtgatcaaaaaagaaaactactacgaagtgaatagcaagtgctatgaggaagctaagaagctgaagaagatcagcaaccaggccgagtttatcgcctccttctacaacaacgatctgatcaagatcaacggcgagctgtatagagtgatcggcgtgaacaacgacctgctgaaccggatcgaagtgaacatgatcgacatcacctaccgcgagtacctggaaaacatgaacgacaagaggccccccaggatcattaagacaatcgcctccaagacccagagcattaagaagtacagcacagacattctgggcaacctgtatgaagtgaaatctaagaagcaccctcagatcatcaaaaagggcaaaaggccggcggccacgaaaaaggccggccaggcaaaaaagaaaaagggatccggacgggctgacgcattggacgattttgatctggatatgctgggaagtgacgccctcgatgattttgaccttgacatgcttggttcggatgcccttgatgactttgacctcgacatgctcggcagtgacgcccttgatgatttcgacctggacatgctgattaactgtacaggcagtggagagggcagaggaagtctgctaacatgcggtgacgtcgaggagaatcctggcccaatggccaagcctttgtctcaagaagaatccaccctcattgaaagagcaacggctacaatcaacagcatccccatctctgaagactacagcgtcgccagcgcagctctctctagcgacggccgcatcttcactggtgtcaatgtatatcattttactgggggaccttgtgcagaactcgtggtgctgggcactgctgctgctgcggcagctggcaacctgacttgtatcgtcgcgatcggaaatgagaacaggggcatcttgagcccctgcggacggtgccgacaggtgcttctcgatctgcatcctgggatcaaagccatagtgaaggacagtgatggacagccgacggcagttgggattcgtgaattgctgccctctggttatgtgtgggagggctaagaattcctagagctcgctgatcagcctcgactgtgccttctagttgccagccatctgttgtttgcccctcccccgtgccttccttgaccctggaaggtgccactcccactgtcctttcctaataaaatgaggaaattgcatcgcattgtctgagtaggtgtcattctattctggggggtggggtggggcaggacagcaagggggaggattgggaagagaatagcaggcatgctggggaggtaccgagggcctatttcccatgattccttcatatttgcatatacgatacaaggctgttagagagataattggaattaatttgactgtaaacacaaagatattagtacaaaatacgtgacgtagaaagtaataatttcttgggtagtttgcagttttaaaattatgttttaaaatggactatcatatgcttaccgtaacttgaaagtatttcgatttcttggctttatatatcttgtggaaaggacgaaacaccgtgcctgagcgaggaacagctcgttttagtactctggaaacagaatctactaaaacaaggcaaaatgccgtgtttatctcgtcaacttgttggcgagatttttgcggccgcaggaacccctagtgatggagttggccactccctctctgcgcgctcgctcgctcactgaggccgggcgaccaaaggtcgcccgacgcccgggctttgcccgggcggcctcagtgagcgagcgagcgcgcagctgcctgcaggggcgcctgatgcggtattttctccttacgcatctgtgcggtatttcacaccgcatacgtcaaagcaaccatagtacgcgccctgtagcggcgcattaagcgcggcgggtgtggtggttacgcgcagcgtgaccgctacacttgccagcgccttagcgcccgctcctttcgctttcttcccttcctttctcgccacgttcgccggctttccccgtcaagctctaaatcgggggctccctttagggttccgatttagtgctttacggcacctcgaccccaaaaaacttgatttgggtgatggttcacgtagtgggccatcgccctgatagacggtttttcgccctttgacgttggagtccacgttctttaatagtggactcttgttccaaactggaacaacactcaactctatctcgggctattcttttgatttataagggattttgccgatttcggtctattggttaaaaaatgagctgatttaacaaaaatttaacgcgaattttaacaaaatattaacgtttacaattttatggtgcactctcagtacaatctgctctgatgccgcatagttaagccagccccgacacccgccaacacccgctgacgcgccctgacgggcttgtctgctcccggcatccgcttacagacaagctgtgaccgtctccgggagctgcatgtgtcagaggttttcaccgtcatcaccgaaacgcgcgagacgaaagggcctcgtgatacgcctatttttataggttaatgtcatgataataatggtttcttagacgtcaggtggcacttttcggggaaatgtgcgcggaacccctatttgtttatttttctaaatacattcaaatatgtatccgctcatgagacaataaccctgataaatgcttcaataatattgaaaaaggaagagtatgagtattcaacatttccgtgtcgcccttattcccttttttgcggcattttgccttcctgtttttgctcacccagaaacgctggtgaaagtaaaagatgctgaagatcagttgggtgcacgagtgggttacatcgaactggatctcaacagcggtaagatccttgagagttttcgccccgaagaacgttttccaatgatgagcacttttaaagttctgctatgtggcgcggtattatcccgtattgacgccgggcaagagcaactcggtcgccgcatacactattctcagaatgacttggttgagtactcaccagtcacagaaaagcatcttacggatggcatgacagtaagagaattatgcagtgctgccataaccatgagtgataacactgcggccaacttacttctgacaacgatcggaggaccgaaggagctaaccgcttttttgcacaacatgggggatcatgtaactcgccttgatcgttgggaaccggagctgaatgaagccataccaaacgacgagcgtgacaccacgatgcctgtagcaatggcaacaacgttgcgcaaactattaactggcgaactacttactctagcttcccggcaacaattaatagactggatggaggcggataaagttgcaggaccacttctgcgctcggcccttccggctggctggtttattgctgataaatctggagccggtgagcgtggaagccgcggtatcattgcagcactggggccagatggtaagccctcccgtatcgtagttatctacacgacggggagtcaggcaactatggatgaacgaaatagacagatcgctgagataggtgcctcactgattaagcattggtaactgtcagaccaagtttactcatatatactttagattgatttaaaacttcatttttaatttaaaaggatctaggtgaagatcctttttgataatctcatgaccaaaatcccttaacgtgagttttcgttccactgagcgtcagaccccgtagaaaagatcaaaggatcttcttgagatcctttttttctgcgcgtaatctgctgcttgcaaacaaaaaaaccaccgctaccagcggtggtttgtttgccggatcaagagctaccaactctttttccgaaggtaactggcttcagcagagcgcagataccaaatactgttcttctagtgtagccgtagttaggccaccacttcaagaactctgtagcaccgcctacatacctcgctctgctaatcctgttaccagtggctgctgccagtggcgataagtcgtgtcttaccgggttggactcaagacgatagttaccggataaggcgcagcggtcgggctgaacggggggttcgtgcacacagcccagcttggagcgaacgacctacaccgaactgagatacctacagcgtgagctatgagaaagcgccacgcttcccgaagggagaaaggcggacaggtatccggtaagcggcagggtcggaacaggagagcgcacgagggagcttccagggggaaacgcctggtatctttatagtcctgtcgggtttcgccacctctgacttgagcgtcgatttttgtgatgctcgtcaggggggcggagcctatggaaaaacgccagcaacgcggcctttttacggttcctggccttttgctggccttttgctcacatgt

SEQ ID NO: 73 - RNA, 7997 nt, synthetic construct
  source 1..7997: mol_type = other RNA
cctgcaggcagctgcgcgctcgctcgctcactgaggccgcccgggcgtcgggcgacctttggtcgcccggcctcagtgagcgagcgagcgcgcagagagggagtggccaactccatcactaggggttcctgcggcctctagactcgaggcgttgacattgattattgactagttattaatagtaatcaattacggggtcattagttcatagcccatatatggagttccgcgttacataacttacggtaaatggcccgcctggctgaccgcccaacgacccccgcccattgacgtcaataatgacgtatgttcccatagtaacgccaatagggactttccattgacgtcaatgggtggagtatttacggtaaactgcccacttggcagtacatcaagtgtatcatatgccaagtacgccccctattgacgtcaatgacggtaaatggcccgcctggcattatgcccagtacatgaccttatgggactttcctacttggcagtacatctacgtattagtcatcgctattaccatggtgatgcggttttggcagtacatcaatgggcgtggatagcggtttgactcacggggatttccaagtctccaccccattgacgtcaatgggagtttgttttggcaccaaaatcaacgggactttccaaaatgtcgtaacaactccgccccattgacgcaaatgggcggtaggcgtgtacggtgggaggtctatataagcagagctctctggctaactaccggtgccaccatggccccaaagaagaagcggaaggtcggtatccacggagtcccagcagccaagcggaactacatcctgggcctggccatcggcatcaccagcgtgggctacggcatcatcgactacgagacacgggacgtgatcgatgccggcgtgcggctgttcaaagaggccaacgtggaaaacaacgagggcaggcggagcaagagaggcgccagaaggctgaagcggcggaggcggcatagaatccagagagtgaagaagctgctgttcgactacaacctgctgaccgaccacagcgagctgagcggcatcaacccctacgaggccagagtgaagggcctgagccagaagctgagcgaggaagagttctctgccgccctgctgcacctggccaagagaagaggcgtgcacaacgtgaacgaggtggaagaggacaccggcaacgagctgtccaccaaagagcagatcagccggaacagcaaggccctggaagagaaatacgtggccgaactgcagctggaacggctgaagaaagacggcgaagtgcggggcagcatcaacagattcaagaccagcgactacgtgaaagaagccaaacagctgctgaaggtgcagaaggcctaccaccagctggaccagagcttcatcgacacctacatcgacctgctggaaacccggcggacctactatgagggacctggcgagggcagccccttcggctggaaggacatcaaagaatggtacgagatgctgatgggccactgcacctacttccccgaggaactgcggagcgtgaagtacgcctacaacgccgacctgtacaacgccctgaacgacctgaacaatctcgtgatcaccagggacgagaacgagaagctggaatattacgagaagttccagatcatcgagaacgtgttcaagcagaagaagaagcccaccctgaagcagatcgccaaagaaatcctcgtgaacgaagaggatattaagggctacagagtgaccagcaccggcaagcccgagttcaccaacctgaaggtgtaccacgacatcaaggacattaccgcccggaaagagattattgagaacgccgagctgctggatcagattgccaagatcctgaccatctaccagagcagcgaggacatccaggaagaactgaccaatctgaactccgagctgacccaggaagagatcgagcagatctctaatctgaagggctataccggcacccacaacctgagcctgaaggccatcaacctgatcctggacgagctgtggcacaccaacgacaaccagatcgctatcttcaaccggctgaagctggtgcccaagaaggtggacctgtcccagcagaaagagatccccaccaccctggtggacgacttcatcctgagccccgtcgtgaagagaagcttcatccagagcatcaaagtgatcaacgccatcatcaagaagtacggcctgcccaacgacatcattatcgagctggcccgcgagaagaactccaaggacgcccagaaaatgatcaacgagatgcagaagcggaaccggcagaccaacgagcggatcgaggaaatcatccggaccaccggcaaagagaacgccaagtacctgatcgagaagatcaagctgcacgacatgcaggaaggcaagtgcctgtacagcctggaagccatccctctggaagatctgctgaacaaccccttcaactatgaggtggaccacatcatccccagaagcgtgtccttcgacaacagcttcaacaacaaggtgctcgtgaagcaggaagaagccagcaagaagggcaaccggaccccattccagtacctgagcagcagcgacagcaagatcagctacgaaaccttcaagaagcacatcctgaatctggccaagggcaagggcagaatcagcaagaccaagaaagagtatctgctggaagaacgggacatcaacaggttctccgtgcagaaagacttcatcaaccggaacctggtggataccagatacgccaccagaggcctgatgaacctgctgcggagctacttcagagtgaacaacctggacgtgaaagtgaagtccatcaatggcggcttcaccagctttctgcggcggaagtggaagtttaagaaagagcggaacaaggggtacaagcaccacgccgaggacgccctgatcattgccaacgccgatttcatcttcaaagagtggaagaaactggacaaggccaaaaaagtgatggaaaaccagatgttcgaggaaaagcaggccgagagcatgcccgagatcgaaaccgagcaggagtacaaagagatcttcatcaccccccaccagatcaagcacattaaggacttcaaggactacaagtacagccaccgggtggacaagaagcctaatagagagctgattaacgacaccctgtactccacccggaaggacgacaagggcaacaccctgatcgtgaacaatctgaacggcctgtacgacaaggacaatgacaagctgaaaaagctgatcaacaagagccccgaaaagctgctgatgtaccaccacgacccccagacctaccagaaactgaagctgattatggaacagtacggcgacgagaagaatcccctgtacaagtactacgaggaaaccgggaactacctgaccaagtactccaaaaaggacaacggccccgtgatcaagaagattaagtattacggcaacaaactgaacgcccatctggacatcaccgacgactaccccaacagcagaaacaaggtcgtgaagctgtccctgaagccctacagattcgacgtgtacctggacaatggcgtgtacaagttcgtgaccgtgaagaatctggatgtgatcaaaaaagaaaactactacgaagtgaatagcaagtgctatgaggaagctaagaagctgaagaagatcagcaaccaggccgagtttatcgcctccttctacaacaacgatctgatcaagatcaacggcgagctgtatagagtgatcggcgtgaacaacgacctgctgaaccggatcgaagtgaacatgatcgacatcacctaccgcgagtacctggaaaacatgaacgacaagaggccccccaggatcattaagacaatcgcctccaagacccagagcattaagaagtacagcacagacattctgggcaacctgtatgaagtgaaatctaagaagcaccctcagatcatcaaaaagggcaaaaggccggcggccacgaaaaaggccggccaggcaaaaaagaaaaagggatccggacgggctgacgcattggacgattttgatctggatatgctgggaagtgacgccctcgatgattttgaccttgacatgcttggttcggatgcccttgatgactttgacctcgacatgctcggcagtgacgcccttgatgatttcgacctggacatgctgattaactgtacaggcagtggagagggcagaggaagtctgctaacatgcggtgacgtcgaggagaatcctggcccaatggccaagcctttgtctcaagaagaatccaccctcattgaaagagcaacggctacaatcaacagcatccccatctctgaagactacagcgtcgccagcgcagctctctctagcgacggccgcatcttcactggtgtcaatgtatatcattttactgggggaccttgtgcagaactcgtggtgctgggcactgctgctgctgcggcagctggcaacctgacttgtatcgtcgcgatcggaaatgagaacaggggcatcttgagcccctgcggacggtgccgacaggtgcttctcgatctgcatcctgggatcaaagccatagtgaaggacagtgatggacagccgacggcagttgggattcgtgaattgctgccctctggttatgtgtgggagggctaagaattcctagagctcgctgatcagcctcgactgtgccttctagttgccagccatctgttgtttgcccctcccccgtgccttccttgaccctggaaggtgccactcccactgtcctttcctaataaaatgaggaaattgcatcgcattgtctgagtaggtgtcattctattctggggggtggggtggggcaggacagcaagggggaggattgggaagagaatagcaggcatgctggggaggtaccgagggcctatttcccatgattccttcatatttgcatatacgatacaaggctgttagagagataattggaattaatttgactgtaaacacaaagatattagtacaaaatacgtgacgtagaaagtaataatttcttgggtagtttgcagttttaaaattatgttttaaaatggactatcatatgcttaccgtaacttgaaagtatttcgatttcttggctttatatatcttgtggaaaggacgaaacaccgcactgctgggggaagagacctgttttagtactctggaaacagaatctactaaaacaaggcaaaatgccgtgtttatctcgtcaacttgttggcgagatttttgcggccgcaggaacccctagtgatggagttggccactccctctctgcgcgctcgctcgctcactgaggccgggcgaccaaaggtcgcccgacgcccgggctttgcccgggcggcctcagtgagcgagcgagcgcgcagctgcctgcaggggcgcctgatgcggtattttctccttacgcatctgtgcggtatttcacaccgcatacgtcaaagcaaccatagtacgcgccctgtagcggcgcattaagcgcggcgggtgtggtggttacgcgcagcgtgaccgctacacttgccagcgccttagcgcccgctcctttcgctttcttcccttcctttctcgccacgttcgccggctttccccgtcaagctctaaatcgggggctccctttagggttccgatttagtgctttacggcacctcgaccccaaaaaacttgatttgggtgatggttcacgtagtgggccatcgccctgatagacggtttttcgccctttgacgttggagtccacgttctttaatagtggactcttgttccaaactggaacaacactcaactctatctcgggctattcttttgatttataagggattttgccgatttcggtctattggttaaaaaatgagctgatttaacaaaaatttaacgcgaattttaacaaaatattaacgtttacaattttatggtgcactctcagtacaatctgctctgatgccgcatagttaagccagccccgacacccgccaacacccgctgacgcgccctgacgggcttgtctgctcccggcatccgcttacagacaagctgtgaccgtctccgggagctgcatgtgtcagaggttttcaccgtcatcaccgaaacgcgcgagacgaaagggcctcgtgatacgcctatttttataggttaatgtcatgataataatggtttcttagacgtcaggtggcacttttcggggaaatgtgcgcggaacccctatttgtttatttttctaaatacattcaaatatgtatccgctcatgagacaataaccctgataaatgcttcaataatattgaaaaaggaagagtatgagtattcaacatttccgtgtcgcccttattcccttttttgcggcattttgccttcctgtttttgctcacccagaaacgctggtgaaagtaaaagatgctgaagatcagttgggtgcacgagtgggttacatcgaactggatctcaacagcggtaagatccttgagagttttcgccccgaagaacgttttccaatgatgagcacttttaaagttctgctatgtggcgcggtattatcccgtattgacgccgggcaagagcaactcggtcgccgcatacactattctcagaatgacttggttgagtactcaccagtcacagaaaagcatcttacggatggcatgacagtaagagaattatgcagtgctgccataaccatgagtgataacactgcggccaacttacttctgacaacgatcggaggaccgaaggagctaaccgcttttttgcacaacatgggggatcatgtaactcgccttgatcgttgggaaccggagctgaatgaagccataccaaacgacgagcgtgacaccacgatgcctgtagcaatggcaacaacgttgcgcaaactattaactggcgaactacttactctagcttcccggcaacaattaatagactggatggaggcggataaagttgcaggaccacttctgcgctcggcccttccggctggctggtttattgctgataaatctggagccggtgagcgtggaagccgcggtatcattgcagcactggggccagatggtaagccctcccgtatcgtagttatctacacgacggggagtcaggcaactatggatgaacgaaatagacagatcgctgagataggtgcctcactgattaagcattggtaactgtcagaccaagtttactcatatatactttagattgatttaaaacttcatttttaatttaaaaggatctaggtgaagatcctttttgataatctcatgaccaaaatcccttaacgtgagttttcgttccactgagcgtcagaccccgtagaaaagatcaaaggatcttcttgagatcctttttttctgcgcgtaatctgctgcttgcaaacaaaaaaaccaccgctaccagcggtggtttgtttgccggatcaagagctaccaactctttttccgaaggtaactggcttcagcagagcgcagataccaaatactgttcttctagtgtagccgtagttaggccaccacttcaagaactctgtagcaccgcctacatacctcgctctgctaatcctgttaccagtggctgctgccagtggcgataagtcgtgtcttaccgggttggactcaagacgatagttaccggataaggcgcagcggtcgggctgaacggggggttcgtgcacacagcccagcttggagcgaacgacctacaccgaactgagatacctacagcgtgagctatgagaaagcgccacgcttcccgaagggagaaaggcggacaggtatccggtaagcggcagggtcggaacaggagagcgcacgagggagcttccagggggaaacgcctggtatctttatagtcctgtcgggtttcgccacctctgacttgagcgtcgatttttgtgatgctcgtcaggggggcggagcctatggaaaaacgccagcaacgcggcctttttacggttcctggccttttgctggccttttgctcacatgt

SEQ ID NO: 74 - RNA, 7996 nt, synthetic construct
  source 1..7996: mol_type = other RNA
cctgcaggcagctgcgcgctcgctcgctcactgaggccgcccgggcgtcgggcgacctttggtcgcccggcctcagtgagcgagcgagcgcgcagagagggagtggccaactccatcactaggggttcctgcggcctctagactcgaggcgttgacattgattattgactagttattaatagtaatcaattacggggtcattagttcatagcccatatatggagttccgcgttacataacttacggtaaatggcccgcctggctgaccgcccaacgacccccgcccattgacgtcaataatgacgtatgttcccatagtaacgccaatagggactttccattgacgtcaatgggtggagtatttacggtaaactgcccacttggcagtacatcaagtgtatcatatgccaagtacgccccctattgacgtcaatgacggtaaatggcccgcctggcattatgcccagtacatgaccttatgggactttcctacttggcagtacatctacgtattagtcatcgctattaccatggtgatgcggttttggcagtacatcaatgggcgtggatagcggtttgactcacggggatttccaagtctccaccccattgacgtcaatgggagtttgttttggcaccaaaatcaacgggactttccaaaatgtcgtaacaactccgccccattgacgcaaatgggcggtaggcgtgtacggtgggaggtctatataagcagagctctctggctaactaccggtgccaccatggccccaaagaagaagcggaaggtcggtatccacggagtcccagcagccaagcggaactacatcctgggcctggccatcggcatcaccagcgtgggctacggcatcatcgactacgagacacgggacgtgatcgatgccggcgtgcggctgttcaaagaggccaacgtggaaaacaacgagggcaggcggagcaagagaggcgccagaaggctgaagcggcggaggcggcatagaatccagagagtgaagaagctgctgttcgactacaacctgctgaccgaccacagcgagctgagcggcatcaacccctacgaggccagagtgaagggcctgagccagaagctgagcgaggaagagttctctgccgccctgctgcacctggccaagagaagaggcgtgcacaacgtgaacgaggtggaagaggacaccggcaacgagctgtccaccaaagagcagatcagccggaacagcaaggccctggaagagaaatacgtggccgaactgcagctggaacggctgaagaaagacggcgaagtgcggggcagcatcaacagattcaagaccagcgactacgtgaaagaagccaaacagctgctgaaggtgcagaaggcctaccaccagctggaccagagcttcatcgacacctacatcgacctgctggaaacccggcggacctactatgagggacctggcgagggcagccccttcggctggaaggacatcaaagaatggtacgagatgctgatgggccactgcacctacttccccgaggaactgcggagcgtgaagtacgcctacaacgccgacctgtacaacgccctgaacgacctgaacaatctcgtgatcaccagggacgagaacgagaagctggaatattacgagaagttccagatcatcgagaacgtgttcaagcagaagaagaagcccaccctgaagcagatcgccaaagaaatcctcgtgaacgaagaggatattaagggctacagagtgaccagcaccggcaagcccgagttcaccaacctgaaggtgtaccacgacatcaaggacattaccgcccggaaagagattattgagaacgccgagctgctggatcagattgccaagatcctgaccatctaccagagcagcgaggacatccaggaagaactgaccaatctgaactccgagctgacccaggaagagatcgagcagatctctaatctgaagggctataccggcacccacaacctgagcctgaaggccatcaacctgatcctggacgagctgtggcacaccaacgacaaccagatcgctatcttcaaccggctgaagctggtgcccaagaaggtggacctgtcccagcagaaagagatccccaccaccctggtggacgacttcatcctgagccccgtcgtgaagagaagcttcatccagagcatcaaagtgatcaacgccatcatcaagaagtacggcctgcccaacgacatcattatcgagctggcccgcgagaagaactccaaggacgcccagaaaatgatcaacgagatgcagaagcggaaccggcagaccaacgagcggatcgaggaaatcatccggaccaccggcaaagagaacgccaagtacctgatcgagaagatcaagctgcacgacatgcaggaaggcaagtgcctgtacagcctggaagccatccctctggaagatctgctgaacaaccccttcaactatgaggtggaccacatcatccccagaagcgtgtccttcgacaacagcttcaacaacaaggtgctcgtgaagcaggaagaagccagcaagaagggcaaccggaccccattccagtacctgagcagcagcgacagcaagatcagctacgaaaccttcaagaagcacatcctgaatctggccaagggcaagggcagaatcagcaagaccaagaaagagtatctgctggaagaacgggacatcaacaggttctccgtgcagaaagacttcatcaaccggaacctggtggataccagatacgccaccagaggcctgatgaacctgctgcggagctacttcagagtgaacaacctggacgtgaaagtgaagtccatcaatggcggcttcaccagctttctgcggcggaagtggaagtttaagaaagagcggaacaaggggtacaagcaccacgccgaggacgccctgatcattgccaacgccgatttcatcttcaaagagtggaagaaactggacaaggccaaaaaagtgatggaaaaccagatgttcgaggaaaagcaggccgagagcatgcccgagatcgaaaccgagcaggagtacaaagagatcttcatcaccccccaccagatcaagcacattaaggacttcaaggactacaagtacagccaccgggtggacaagaagcctaatagagagctgattaacgacaccctgtactccacccggaaggacgacaagggcaacaccctgatcgtgaacaatctgaacggcctgtacgacaaggacaatgacaagctgaaaaagctgatcaacaagagccccgaaaagctgctgatgtaccaccacgacccccagacctaccagaaactgaagctgattatggaacagtacggcgacgagaagaatcccctgtacaagtactacgaggaaaccgggaactacctgaccaagtactccaaaaaggacaacggccccgtgatcaagaagattaagtattacggcaacaaactgaacgcccatctggacatcaccgacgactaccccaacagcagaaacaaggtcgtgaagctgtccctgaagccctacagattcgacgtgtacctggacaatggcgtgtacaagttcgtgaccgtgaagaatctggatgtgatcaaaaaagaaaactactacgaagtgaatagcaagtgctatgaggaagctaagaagctgaagaagatcagcaaccaggccgagtttatcgcctccttctacaacaacgatctgatcaagatcaacggcgagctgtatagagtgatcggcgtgaacaacgacctgctgaaccggatcgaagtgaacatgatcgacatcacctaccgcgagtacctggaaaacatgaacgacaagaggccccccaggatcattaagacaatcgcctccaagacccagagcattaagaagtacagcacagacattctgggcaacctgtatgaagtgaaatctaagaagcaccctcagatcatcaaaaagggcaaaaggccggcggccacgaaaaaggccggccaggcaaaaaagaaaaagggatccggacgggctgacgcattggacgattttgatctggatatgctgggaagtgacgccctcgatgattttgaccttgacatgcttggttcggatgcccttgatgactttgacctcgacatgctcggcagtgacgcccttgatgatttcgacctggacatgctgattaactgtacaggcagtggagagggcagaggaagtctgctaacatgcggtgacgtcgaggagaatcctggcccaatggccaagcctttgtctcaagaagaatccaccctcattgaaagagcaacggctacaatcaacagcatccccatctctgaagactacagcgtcgccagcgcagctctctctagcgacggccgcatcttcactggtgtcaatgtatatcattttactgggggaccttgtgcagaactcgtggtgctgggcactgctgctgctgcggcagctggcaacctgacttgtatcgtcgcgatcggaaatgagaacaggggcatcttgagcccctgcggacggtgccgacaggtgcttctcgatctgcatcctgggatcaaagccatagtgaaggacagtgatggacagccgacggcagttgggattcgtgaattgctgccctctggttatgtgtgggagggctaagaattcctagagctcgctgatcagcctcgactgtgccttctagttgccagccatctgttgtttgcccctcccccgtgccttccttgaccctggaaggtgccactcccactgtcctttcctaataaaatgaggaaattgcatcgcattgtctgagtaggtgtcattctattctggggggtggggtggggcaggacagcaagggggaggattgggaagagaatagcaggcatgctggggaggtaccgagggcctatttcccatgattccttcatatttgcatatacgatacaaggctgttagagagataattggaattaatttgactgtaaacacaaagatattagtacaaaatacgtgacgtagaaagtaataatttcttgggtagtttgcagttttaaaattatgttttaaaatggactatcatatgcttaccgtaacttgaaagtatttcgatttcttggctttatatatcttgtggaaaggacgaaacaccgacctgtgaggtgctgcgagggttttagtactctggaaacagaatctactaaaacaaggcaaaatgccgtgtttatctcgtcaacttgttggcgagatttttgcggccgcaggaacccctagtgatggagttggccactccctctctgcgcgctcgctcgctcactgaggccgggcgaccaaaggtcgcccgacgcccgggctttgcccgggcggcctcagtgagcgagcgagcgcgcagctgcctgcaggggcgcctgatgcggtattttctccttacgcatctgtgcggtatttcacaccgcatacgtcaaagcaaccatagtacgcgccctgtagcggcgcattaagcgcggcgggtgtggtggttacgcgcagcgtgaccgctacacttgccagcgccttagcgcccgctcctttcgctttcttcccttcctttctcgccacgttcgccggctttccccgtcaagctctaaatcgggggctccctttagggttccgatttagtgctttacggcacctcgaccccaaaaaacttgatttgggtgatggttcacgtagtgggccatcgccctgatagacggtttttcgccctttgacgttggagtccacgttctttaatagtggactcttgttccaaactggaacaacactcaactctatctcgggctattcttttgatttataagggattttgccgatttcggtctattggttaaaaaatgagctgatttaacaaaaatttaacgcgaattttaacaaaatattaacgtttacaattttatggtgcactctcagtacaatctgctctgatgccgcatagttaagccagccccgacacccgccaacacccgctgacgcgccctgacgggcttgtctgctcccggcatccgcttacagacaagctgtgaccgtctccgggagctgcatgtgtcagaggttttcaccgtcatcaccgaaacgcgcgagacgaaagggcctcgtgatacgcctatttttataggttaatgtcatgataataatggtttcttagacgtcaggtggcacttttcggggaaatgtgcgcggaacccctatttgtttatttttctaaatacattcaaatatgtatccgctcatgagacaataaccctgataaatgcttcaataatattgaaaaaggaagagtatgagtattcaacatttccgtgtcgcccttattcccttttttgcggcattttgccttcctgtttttgctcacccagaaacgctggtgaaagtaaaagatgctgaagatcagttgggtgcacgagtgggttacatcgaactggatctcaacagcggtaagatccttgagagttttcgccccgaagaacgttttccaatgatgagcacttttaaagttctgctatgtggcgcggtattatcccgtattgacgccgggcaagagcaactcggtcgccgcatacactattctcagaatgacttggttgagtactcaccagtcacagaaaagcatcttacggatggcatgacagtaagagaattatgcagtgctgccataaccatgagtgataacactgcggccaacttacttctgacaacgatcggaggaccgaaggagctaaccgcttttttgcacaacatgggggatcatgtaactcgccttgatcgttgggaaccggagctgaatgaagccataccaaacgacgagcgtgacaccacgatgcctgtagcaatggcaacaacgttgcgcaaactattaactggcgaactacttactctagcttcccggcaacaattaatagactggatggaggcggataaagttgcaggaccacttctgcgctcggcccttccggctggctggtttattgctgataaatctggagccggtgagcgtggaagccgcggtatcattgcagcactggggccagatggtaagccctcccgtatcgtagttatctacacgacggggagtcaggcaactatggatgaacgaaatagacagatcgctgagataggtgcctcactgattaagcattggtaactgtcagaccaagtttactcatatatactttagattgatttaaaacttcatttttaatttaaaaggatctaggtgaagatcctttttgataatctcatgaccaaaatcccttaacgtgagttttcgttccactgagcgtcagaccccgtagaaaagatcaaaggatcttcttgagatcctttttttctgcgcgtaatctgctgcttgcaaacaaaaaaaccaccgctaccagcggtggtttgtttgccggatcaagagctaccaactctttttccgaaggtaactggcttcagcagagcgcagataccaaatactgttcttctagtgtagccgtagttaggccaccacttcaagaactctgtagcaccgcctacatacctcgctctgctaatcctgttaccagtggctgctgccagtggcgataagtcgtgtcttaccgggttggactcaagacgatagttaccggataaggcgcagcggtcgggctgaacggggggttcgtgcacacagcccagcttggagcgaacgacctacaccgaactgagatacctacagcgtgagctatgagaaagcgccacgcttcccgaagggagaaaggcggacaggtatccggtaagcggcagggtcggaacaggagagcgcacgagggagcttccagggggaaacgcctggtatctttatagtcctgtcgggtttcgccacctctgacttgagcgtcgatttttgtgatgctcgtcaggggggcggagcctatggaaaaacgccagcaacgcggcctttttacggttcctggccttttgctggccttttgctcacatgt

SEQ ID NO: 75 - RNA, 21 nt, synthetic construct
  source 1..21: mol_type = other RNA
cctcaaggattaccgggctag

SEQ ID NO: 76 - RNA, 21 nt, synthetic construct
  source 1..21: mol_type = other RNA
ctagcccggtaatccttgagg

SEQ ID NO: 77 - RNA, 21 nt, synthetic construct
  source 1..21: mol_type = other RNA
ggcagggctggactccccctc

SEQ ID NO: 78 - RNA, 21 nt, synthetic construct
  source 1..21: mol_type = other RNA
ctagcccggtaatccttgagg

SEQ ID NO: 79 - RNA, 21 nt, synthetic construct
  source 1..21: mol_type = other RNA
ggcagggctggactccccctc

SEQ ID NO: 80 - RNA, 21 nt, synthetic construct
  source 1..21: mol_type = other RNA
tcctagcccggtaatccttga

SEQ ID NO: 81 - RNA, 7997 nt, synthetic construct
  source 1..7997: mol_type = other RNA
cctgcaggcagctgcgcgctcgctcgctcactgaggccgcccgggcgtcgggcgacctttggtcgcccggcctcagtgagcgagcgagcgcgcagagagggagtggccaactccatcactaggggttcctgcggcctctagactcgaggcgttgacattgattattgactagttattaatagtaatcaattacggggtcattagttcatagcccatatatggagttccgcgttacataacttacggtaaatggcccgcctggctgaccgcccaacgacccccgcccattgacgtcaataatgacgtatgttcccatagtaacgccaatagggactttccattgacgtcaatgggtggagtatttacggtaaactgcccacttggcagtacatcaagtgtatcatatgccaagtacgccccctattgacgtcaatgacggtaaatggcccgcctggcattatgcccagtacatgaccttatgggactttcctacttggcagtacatctacgtattagtcatcgctattaccatggtgatgcggttttggcagtacatcaatgggcgtggatagcggtttgactcacggggatttccaagtctccaccccattgacgtcaatgggagtttgttttggcaccaaaatcaacgggactttccaaaatgtcgtaacaactccgccccattgacgcaaatgggcggtaggcgtgtacggtgggaggtctatataagcagagctctctggctaactaccggtgccaccatggccccaaagaagaagcggaaggtcggtatccacggagtcccagcagccaagcggaactacatcctgggcctggccatcggcatcaccagcgtgggctacggcatcatcgactacgagacacgggacgtgatcgatgccggcgtgcggctgttcaaagaggccaacgtggaaaacaacgagggcaggcggagcaagagaggcgccagaaggctgaagcggcggaggcggcatagaatccagagagtgaagaagctgctgttcgactacaacctgctgaccgaccacagcgagctgagcggcatcaacccctacgaggccagagtgaagggcctgagccagaagctgagcgaggaagagttctctgccgccctgctgcacctggccaagagaagaggcgtgcacaacgtgaacgaggtggaagaggacaccggcaacgagctgtccaccaaagagcagatcagccggaacagcaaggccctggaagagaaatacgtggccgaactgcagctggaacggctgaagaaagacggcgaagtgcggggcagcatcaacagattcaagaccagcgactacgtgaaagaagccaaacagctgctgaaggtgcagaaggcctaccaccagctggaccagagcttcatcgacacctacatcgacctgctggaaacccggcggacctactatgagggacctggcgagggcagccccttcggctggaaggacatcaaagaatggtacgagatgctgatgggccactgcacctacttccccgaggaactgcggagcgtgaagtacgcctacaacgccgacctgtacaacgccctgaacgacctgaacaatctcgtgatcaccagggacgagaacgagaagctggaatattacgagaagttccagatcatcgagaacgtgttcaagcagaagaagaagcccaccctgaagcagatcgccaaagaaatcctcgtgaacgaagaggatattaagggctacagagtgaccagcaccggcaagcccgagttcaccaacctgaaggtgtaccacgacatcaaggacattaccgcccggaaagagattattgagaacgccgagctgctggatcagattgccaagatcctgaccatctaccagagcagcgaggacatccaggaagaactgaccaatctgaactccgagctgacccaggaagagatcgagcagatctctaatctgaagggctataccggcacccacaacctgagcctgaaggccatcaacctgatcctggacgagctgtggcacaccaacgacaaccagatcgctatcttcaaccggctgaagctggtgcccaagaaggtggacctgtcccagcagaaagagatccccaccaccctggtggacgacttcatcctgagccccgtcgtgaagagaagcttcatccagagcatcaaagtgatcaacgccatcatcaagaagtacggcctgcccaacgacatcattatcgagctggcccgcgagaagaactccaaggacgcccagaaaatgatcaacgagatgcagaagcggaaccggcagaccaacgagcggatcgaggaaatcatccggaccaccggcaaagagaacgccaagtacctgatcgagaagatcaagctgcacgacatgcaggaaggcaagtgcctgtacagcctggaagccatccctctggaagatctgctgaacaaccccttcaactatgaggtggaccacatcatccccagaagcgtgtccttcgacaacagcttcaacaacaaggtgctcgtgaagcaggaagaagccagcaagaagggcaaccggaccccattccagtacctgagcagcagcgacagcaagatcagctacgaaaccttcaagaagcacatcctgaatctggccaagggcaagggcagaatcagcaagaccaagaaagagtatctgctggaagaacgggacatcaacaggttctccgtgcagaaagacttcatcaaccggaacctggtggataccagatacgccaccagaggcctgatgaacctgctgcggagctacttcagagtgaacaacctggacgtgaaagtgaagtccatcaatggcggcttcaccagctttctgcggcggaagtggaagtttaagaaagagcggaacaaggggtacaagcaccacgccgaggacgccctgatcattgccaacgccgatttcatcttcaaagagtggaagaaactggacaaggccaaaaaagtgatggaaaaccagatgttcgaggaaaagcaggccgagagcatgcccgagatcgaaaccgagcaggagtacaaagagatcttcatcaccccccaccagatcaagcacattaaggacttcaaggactacaagtacagccaccgggtggacaagaagcctaatagagagctgattaacgacaccctgtactccacccggaaggacgacaagggcaacaccctgatcgtgaacaatctgaacggcctgtacgacaaggacaatgacaagctgaaaaagctgatcaacaagagccccgaaaagctgctgatgtaccaccacgacccccagacctaccagaaactgaagctgattatggaacagtacggcgacgagaagaatcccctgtacaagtactacgaggaaaccgggaactacctgaccaagtactccaaaaaggacaacggccccgtgatcaagaagattaagtattacggcaacaaactgaacgcccatctggacatcaccgacgactaccccaacagcagaaacaaggtcgtgaagctgtccctgaagccctacagattcgacgtgtacctggacaatggcgtgtacaagttcgtgaccgtgaagaatctggatgtgatcaaaaaagaaaactactacgaagtgaatagcaagtgctatgaggaagctaagaagctgaagaagatcagcaaccaggccgagtttatcgcctccttctacaacaacgatctgatcaagatcaacggcgagctgtatagagtgatcggcgtgaacaacgacctgctgaaccggatcgaagtgaacatgatcgacatcacctaccgcgagtacctggaaaacatgaacgacaagaggccccccaggatcattaagacaatcgcctccaagacccagagcattaagaagtacagcacagacattctgggcaacctgtatgaagtgaaatctaagaagcaccctcagatcatcaaaaagggcaaaaggccggcggccacgaaaaaggccggccaggcaaaaaagaaaaagggatccggacgggctgacgcattggacgattttgatctggatatgctgggaagtgacgccctcgatgattttgaccttgacatgcttggttcggatgcccttgatgactttgacctcgacatgctcggcagtgacgcccttgatgatttcgacctggacatgctgattaactgtacaggcagtggagagggcagaggaagtctgctaacatgcggtgacgtcgaggagaatcctggcccaatggccaagcctttgtctcaagaagaatccaccctcattgaaagagcaacggctacaatcaacagcatccccatctctgaagactacagcgtcgccagcgcagctctctctagcgacggccgcatcttcactggtgtcaatgtatatcattttactgggggaccttgtgcagaactcgtggtgctgggcactgctgctgctgcggcagctggcaacctgacttgtatcgtcgcgatcggaaatgagaacaggggcatcttgagcccctgcggacggtgccgacaggtgcttctcgatctgcatcctgggatcaaagccatagtgaaggacagtgatggacagccgacggcagttgggattcgtgaattgctgccctctggttatgtgtgggagggctaagaattcctagagctcgctgatcagcctcgactgtgccttctagttgccagccatctgttgtttgcccctcccccgtgccttccttgaccctggaaggtgccactcccactgtcctttcctaataaaatgaggaaattgcatcgcattgtctgagtaggtgtcattctattctggggggtggggtggggcaggacagcaagggggaggattgggaagagaatagcaggcatgctggggaggtaccgagggcctatttcccatgattccttcatatttgcatatacgatacaaggctgttagagagataattggaattaatttgactgtaaacacaaagatattagtacaaaatacgtgacgtagaaagtaataatttcttgggtagtttgcagttttaaaattatgttttaaaatggactatcatatgcttaccgtaacttgaaagtatttcgatttcttggctttatatatcttgtggaaaggacgaaacaccgcctcaaggattaccgggctaggttttagtactctggaaacagaatctactaaaacaaggcaaaatgccgtgtttatctcgtcaacttgttggcgagatttttgcggccgcaggaacccctagtgatggagttggccactccctctctgcgcgctcgctcgctcactgaggccgggcgaccaaaggtcgcccgacgcccgggctttgcccgggcggcctcagtgagcgagcgagcgcgcagctgcctgcaggggcgcctgatgcggtattttctccttacgcatctgtgcggtatttcacaccgcatacgtcaaagcaaccatagtacgcgccctgtagcggcgcattaagcgcggcgggtgtggtggttacgcgcagcgtgaccgctacacttgccagcgccttagcgcccgctcctttcgctttcttcccttcctttctcgccacgttcgccggctttccccgtcaagctctaaatcgggggctccctttagggttccgatttagtgctttacggcacctcgaccccaaaaaacttgatttgggtgatggttcacgtagtgggccatcgccctgatagacggtttttcgccctttgacgttggagtccacgttctttaatagtggactcttgttccaaactggaacaacactcaactctatctcgggctattcttttgatttataagggattttgccgatttcggtctattggttaaaaaatgagctgatttaacaaaaatttaacgcgaattttaacaaaatattaacgtttacaattttatggtgcactctcagtacaatctgctctgatgccgcatagttaagccagccccgacacccgccaacacccgctgacgcgccctgacgggcttgtctgctcccggcatccgcttacagacaagctgtgaccgtctccgggagctgcatgtgtcagaggttttcaccgtcatcaccgaaacgcgcgagacgaaagggcctcgtgatacgcctatttttataggttaatgtcatgataataatggtttcttagacgtcaggtggcacttttcggggaaatgtgcgcggaacccctatttgtttatttttctaaatacattcaaatatgtatccgctcatgagacaataaccctgataaatgcttcaataatattgaaaaaggaagagtatgagtattcaacatttccgtgtcgcccttattcccttttttgcggcattttgccttcctgtttttgctcacccagaaacgctggtgaaagtaaaagatgctgaagatcagttgggtgcacgagtgggttacatcgaactggatctcaacagcggtaagatccttgagagttttcgccccgaagaacgttttccaatgatgagcacttttaaagttctgctatgtggcgcggtattatcccgtattgacgccgggcaagagcaactcggtcgccgcatacactattctcagaatgacttggttgagtactcaccagtcacagaaaagcatcttacggatggcatgacagtaagagaattatgcagtgctgccataaccatgagtgataacactgcggccaacttacttctgacaacgatcggaggaccgaaggagctaaccgcttttttgcacaacatgggggatcatgtaactcgccttgatcgttgggaaccggagctgaatgaagccataccaaacgacgagcgtgacaccacgatgcctgtagcaatggcaacaacgttgcgcaaactattaactggcgaactacttactctagcttcccggcaacaattaatagactggatggaggcggataaagttgcaggaccacttctgcgctcggcccttccggctggctggtttattgctgataaatctggagccggtgagcgtggaagccgcggtatcattgcagcactggggccagatggtaagccctcccgtatcgtagttatctacacgacggggagtcaggcaactatggatgaacgaaatagacagatcgctgagataggtgcctcactgattaagcattggtaactgtcagaccaagtttactcatatatactttagattgatttaaaacttcatttttaatttaaaaggatctaggtgaagatcctttttgataatctcatgaccaaaatcccttaacgtgagttttcgttccactgagcgtcagaccccgtagaaaagatcaaaggatcttcttgagatcctttttttctgcgcgtaatctgctgcttgcaaacaaaaaaaccaccgctaccagcggtggtttgtttgccggatcaagagctaccaactctttttccgaaggtaactggcttcagcagagcgcagataccaaatactgttcttctagtgtagccgtagttaggccaccacttcaagaactctgtagcaccgcctacatacctcgctctgctaatcctgttaccagtggctgctgccagtggcgataagtcgtgtcttaccgggttggactcaagacgatagttaccggataaggcgcagcggtcgggctgaacggggggttcgtgcacacagcccagcttggagcgaacgacctacaccgaactgagatacctacagcgtgagctatgagaaagcgccacgcttcccgaagggagaaaggcggacaggtatccggtaagcggcagggtcggaacaggagagcgcacgagggagcttccagggggaaacgcctggtatctttatagtcctgtcgggtttcgccacctctgacttgagcgtcgatttttgtgatgctcgtcaggggggcggagcctatggaaaaacgccagcaacgcggcctttttacggttcctggccttttgctggccttttgctcacatgt

SEQ ID NO: 82 - RNA, 7997 nt, synthetic construct
  source 1..7997: mol_type = other RNA
cctgcaggcagctgcgcgctcgctcgctcactgaggccgcccgggcgtcgggcgacctttggtcgcccggcctcagtgagcgagcgagcgcgcagagagggagtggccaactccatcactaggggttcctgcggcctctagactcgaggcgttgacattgattattgactagttattaatagtaatcaattacggggtcattagttcatagcccatatatggagttccgcgttacataacttacggtaaatggcccgcctggctgaccgcccaacgacccccgcccattgacgtcaataatgacgtatgttcccatagtaacgccaatagggactttccattgacgtcaatgggtggagtatttacggtaaactgcccacttggcagtacatcaagtgtatcatatgccaagtacgccccctattgacgtcaatgacggtaaatggcccgcctggcattatgcccagtacatgaccttatgggactttcctacttggcagtacatctacgtattagtcatcgctattaccatggtgatgcggttttggcagtacatcaatgggcgtggatagcggtttgactcacggggatttccaagtctccaccccattgacgtcaatgggagtttgttttggcaccaaaatcaacgggactttccaaaatgtcgtaacaactccgccccattgacgcaaatgggcggtaggcgtgtacggtgggaggtctatataagcagagctctctggctaactaccggtgccaccatggccccaaagaagaagcggaaggtcggtatccacggagtcccagcagccaagcggaactacatcctgggcctggccatcggcatcaccagcgtgggctacggcatcatcgactacgagacacgggacgtgatcgatgccggcgtgcggctgttcaaagaggccaacgtggaaaacaacgagggcaggcggagcaagagaggcgccagaaggctgaagcggcggaggcggcatagaatccagagagtgaagaagctgctgttcgactacaacctgctgaccgaccacagcgagctgagcggcatcaacccctacgaggccagagtgaagggcctgagccagaagctgagcgaggaagagttctctgccgccctgctgcacctggccaagagaagaggcgtgcacaacgtgaacgaggtggaagaggacaccggcaacgagctgtccaccaaagagcagatcagccggaacagcaaggccctggaagagaaatacgtggccgaactgcagctggaacggctgaagaaagacggcgaagtgcggggcagcatcaacagattcaagaccagcgactacgtgaaagaagccaaacagctgctgaaggtgcagaaggcctaccaccagctggaccagagcttcatcgacacctacatcgacctgctggaaacccggcggacctactatgagggacctggcgagggcagccccttcggctggaaggacatcaaagaatggtacgagatgctgatgggccactgcacctacttccccgaggaactgcggagcgtgaagtacgcctacaacgccgacctgtacaacgccctgaacgacctgaacaatctcgtgatcaccagggacgagaacgagaagctggaatattacgagaagttccagatcatcgagaacgtgttcaagcagaagaagaagcccaccctgaagcagatcgccaaagaaatcctcgtgaacgaagaggatattaagggctacagagtgaccagcaccggcaagcccgagttcaccaacctgaaggtgtaccacgacatcaaggacattaccgcccggaaagagattattgagaacgccgagctgctggatcagattgccaagatcctgaccatctaccagagcagcgaggacatccaggaagaactgaccaatctgaactccgagctgacccaggaagagatcgagcagatctctaatctgaagggctataccggcacccacaacctgagcctgaaggccatcaacctgatcctggacgagctgtggcacaccaacgacaaccagatcgctatcttcaaccggctgaagctggtgcccaagaaggtggacctgtcccagcagaaagagatccccaccaccctggtggacgacttcatcctgagccccgtcgtgaagagaagcttcatccagagcatcaaagtgatcaacgccatcatcaagaagtacggcctgcccaacgacatcattatcgagctggcccgcgagaagaactccaaggacgcccagaaaatgatcaacgagatgcagaagcggaaccggcagaccaacgagcggatcgaggaaatcatccggaccaccggcaaagagaacgccaagtacctgatcgagaagatcaagctgcacgacatgcaggaaggcaagtgcctgtacagcctggaagccatccctctggaagatctgctgaacaaccccttcaactatgaggtggaccacatcatccccagaagcgtgtccttcgacaacagcttcaacaacaaggtgctcgtgaagcaggaagaagccagcaagaagggcaaccggaccccattccagtacctgagcagcagcgacagcaagatcagctacgaaaccttcaagaagcacatcctgaatctggccaagggcaagggcagaatcagcaagaccaagaaagagtatctgctggaagaacgggacatcaacaggttctccgtgcagaaagacttcatcaaccggaacctggtggataccagatacgccaccagaggcctgatgaacctgctgcggagctacttcagagtgaacaacctggacgtgaaagtgaagtccatcaatggcggcttcaccagctttctgcggcggaagtggaagtttaagaaagagcggaacaaggggtacaagcaccacgccgaggacgccctgatcattgccaacgccgatttcatcttcaaagagtggaagaaactggacaaggccaaaaaagtgatggaaaaccagatgttcgaggaaaagcaggccgagagcatgcccgagatcgaaaccgagcaggagtacaaagagatcttcatcaccccccaccagatcaagcacattaaggacttcaaggactacaagtacagccaccgggtggacaagaagcctaatagagagctgattaacgacaccctgtactccacccggaaggacgacaagggcaacaccctgatcgtgaacaatctgaacggcctgtacgacaaggacaatgacaagctgaaaaagctgatcaacaagagccccgaaaagctgctgatgtaccaccacgacccccagacctaccagaaactgaagctgattatggaacagtacggcgacgagaagaatcccctgtacaagtactacgaggaaaccgggaactacctgaccaagtactccaaaaaggacaacggccccgtgatcaagaagattaagtattacggcaacaaactgaacgcccatctggacatcaccgacgactaccccaacagcagaaacaaggtcgtgaagctgtccctgaagccctacagattcgacgtgtacctggacaatggcgtgtacaagttcgtgaccgtgaagaatctggatgtgatcaaaaaagaaaactactacgaagtgaatagcaagtgctatgaggaagctaagaagctgaagaagatcagcaaccaggccgagtttatcgcctccttctacaacaacgatctgatcaagatcaacggcgagctgtatagagtgatcggcgtgaacaacgacctgctgaaccggatcgaagtgaacatgatcgacatcacctaccgcgagtacctggaaaacatgaacgacaagaggccccccaggatcattaagacaatcgcctccaagacccagagcattaagaagtacagcacagacattctgggcaacctgtatgaagtgaaatctaagaagcaccctcagatcatcaaaaagggcaaaaggccggcggccacgaaaaaggccggccaggcaaaaaagaaaaagggatccggacgggctgacgcattggacgattttgatctggatatgctgggaagtgacgccctcgatgattttgaccttgacatgcttggttcggatgcccttgatgactttgacctcgacatgctcggcagtgacgcccttgatgatttcgacctggacatgctgattaactgtacaggcagtggagagggcagaggaagtctgctaacatgcggtgacgtcgaggagaatcctggcccaatggccaagcctttgtctcaagaagaatccaccctcattgaaagagcaacggctacaatcaacagcatccccatctctgaagactacagcgtcgccagcgcagctctctctagcgacggccgcatcttcactggtgtcaatgtatatcattttactgggggaccttgtgcagaactcgtggtgctgggcactgctgctgctgcggcagctggcaacctgacttgtatcgtcgcgatcggaaatgagaacaggggcatcttgagcccctgcggacggtgccgacaggtgcttctcgatctgcatcctgggatcaaagccatagtgaaggacagtgatggacagccgacggcagttgggattcgtgaattgctgccctctggttatgtgtgggagggctaagaattcctagagctcgctgatcagcctcgactgtgccttctagttgccagccatctgttgtttgcccctcccccgtgccttccttgaccctggaaggtgccactcccactgtcctttcctaataaaatgaggaaattgcatcgcattgtctgagtaggtgtcattctattctggggggtggggtggggcaggacagcaagggggaggattgggaagagaatagcaggcatgctggggaggtaccgagggcctatttcccatgattccttcatatttgcatatacgatacaaggctgttagagagataattggaattaatttgactgtaaacacaaagatattagtacaaaatacgtgacgtagaaagtaataatttcttgggtagtttgcagttttaaaattatgttttaaaatggactatcatatgcttaccgtaacttgaaagtatttcgatttcttggctttatatatcttgtggaaaggacgaaacaccgctagcccggtaatccttgagggttttagtactctggaaacagaatctactaaaacaaggcaaaatgccgtgtttatctcgtcaacttgttggcgagatttttgcggccgcaggaacccctagtgatggagttggccactccctctctgcgcgctcgctcgctcactgaggccgggcgaccaaaggtcgcccgacgcccgggctttgcccgggcggcctcagtgagcgagcgagcgcgcagctgcctgcaggggcgcctgatgcggtattttctccttacgcatctgtgcggtatttcacaccgcatacgtcaaagcaaccatagtacgcgccctgtagcggcgcattaagcgcggcgggtgtggtggttacgcgcagcgtgaccgctacacttgccagcgccttagcgcccgctcctttcgctttcttcccttcctttctcgccacgttcgccggctttccccgtcaagctctaaatcgggggctccctttagggttccgatttagtgctttacggcacctcgaccccaaaaaacttgatttgggtgatggttcacgtagtgggccatcgccctgatagacggtttttcgccctttgacgttggagtccacgttctttaatagtggactcttgttccaaactggaacaacactcaactctatctcgggctattcttttgatttataagggattttgccgatttcggtctattggttaaaaaatgagctgatttaacaaaaatttaacgcgaattttaacaaaatattaacgtttacaattttatggtgcactctcagtacaatctgctctgatgccgcatagttaagccagccccgacacccgccaacacccgctgacgcgccctgacgggcttgtctgctcccggcatccgcttacagacaagctgtgaccgtctccgggagctgcatgtgtcagaggttttcaccgtcatcaccgaaacgcgcgagacgaaagggcctcgtgatacgcctatttttataggttaatgtcatgataataatggtttcttagacgtcaggtggcacttttcggggaaatgtgcgcggaacccctatttgtttatttttctaaatacattcaaatatgtatccgctcatgagacaataaccctgataaatgcttcaataatattgaaaaaggaagagtatgagtattcaacatttccgtgtcgcccttattcccttttttgcggcattttgccttcctgtttttgctcacccagaaacgctggtgaaagtaaaagatgctgaagatcagttgggtgcacgagtgggttacatcgaactggatctcaacagcggtaagatccttgagagttttcgccccgaagaacgttttccaatgatgagcacttttaaagttctgctatgtggcgcggtattatcccgtattgacgccgggcaagagcaactcggtcgccgcatacactattctcagaatgacttggttgagtactcaccagtcacagaaaagcatcttacggatggcatgacagtaagagaattatgcagtgctgccataaccatgagtgataacactgcggccaacttacttctgacaacgatcggaggaccgaaggagctaaccgcttttttgcacaacatgggggatcatgtaactcgccttgatcgttgggaaccggagctgaatgaagccataccaaacgacgagcgtgacaccacgatgcctgtagcaatggcaacaacgttgcgcaaactattaactggcgaactacttactctagcttcccggcaacaattaatagactggatggaggcggataaagttgcaggaccacttctgcgctcggcccttccggctggctggtttattgctgataaatctggagccggtgagcgtggaagccgcggtatcattgcagcactggggccagatggtaagccctcccgtatcgtagttatctacacgacggggagtcaggcaactatggatgaacgaaatagacagatcgctgagataggtgcctcactgattaagcattggtaactgtcagaccaagtttactcatatatactttagattgatttaaaacttcatttttaatttaaaaggatctaggtgaagatcctttttgataatctcatgaccaaaatcccttaacgtgagttttcgttccactgagcgtcagaccccgtagaaaagatcaaaggatcttcttgagatcctttttttctgcgcgtaatctgctgcttgcaaacaaaaaaaccaccgctaccagcggtggtttgtttgccggatcaagagctaccaactctttttccgaaggtaactggcttcagcagagcgcagataccaaatactgttcttctagtgtagccgtagttaggccaccacttcaagaactctgtagcaccgcctacatacctcgctctgctaatcctgttaccagtggctgctgccagtggcgataagtcgtgtcttaccgggttggactcaagacgatagttaccggataaggcgcagcggtcgggctgaacggggggttcgtgcacacagcccagcttggagcgaacgacctacaccgaactgagatacctacagcgtgagctatgagaaagcgccacgcttcccgaagggagaaaggcggacaggtatccggtaagcggcagggtcggaacaggagagcgcacgagggagcttccagggggaaacgcctggtatctttatagtcctgtcgggtttcgccacctctgacttgagcgtcgatttttgtgatgctcgtcaggggggcggagcctatggaaaaacgccagcaacgcggcctttttacggttcctggccttttgctggccttttgctcacatgt

SEQ ID NO: 83 - RNA, 7996 nt, synthetic construct
  source 1..7996: mol_type = other RNA
cctgcaggcagctgcgcgctcgctcgctcactgaggccgcccgggcgtcgggcgacctttggtcgcccggcctcagtgagcgagcgagcgcgcagagagggagtggccaactccatcactaggggttcctgcggcctctagactcgaggcgttgacattgattattgactagttattaatagtaatcaattacggggtcattagttcatagcccatatatggagttccgcgttacataacttacggtaaatggcccgcctggctgaccgcccaacgacccccgcccattgacgtcaataatgacgtatgttcccatagtaacgccaatagggactttccattgacgtcaatgggtggagtatttacggtaaactgcccacttggcagtacatcaagtgtatcatatgccaagtacgccccctattgacgtcaatgacggtaaatggcccgcctggcattatgcccagtacatgaccttatgggactttcctacttggcagtacatctacgtattagtcatcgctattaccatggtgatgcggttttggcagtacatcaatgggcgtggatagcggtttgactcacggggatttccaagtctccaccccattgacgtcaatgggagtttgttttggcaccaaaatcaacgggactttccaaaatgtcgtaacaactccgccccattgacgcaaatgggcggtaggcgtgtacggtgggaggtctatataagcagagctctctggctaactaccggtgccaccatggccccaaagaagaagcggaaggtcggtatccacggagtcccagcagccaagcggaactacatcctgggcctggccatcggcatcaccagcgtgggctacggcatcatcgactacgagacacgggacgtgatcgatgccggcgtgcggctgttcaaagaggccaacgtggaaaacaacgagggcaggcggagcaagagaggcgccagaaggctgaagcggcggaggcggcatagaatccagagagtgaagaagctgctgttcgactacaacctgctgaccgaccacagcgagctgagcggcatcaacccctacgaggccagagtgaagggcctgagccagaagctgagcgaggaagagttctctgccgccctgctgcacctggccaagagaagaggcgtgcacaacgtgaacgaggtggaagaggacaccggcaacgagctgtccaccaaagagcagatcagccggaacagcaaggccctggaagagaaatacgtggccgaactgcagctggaacggctgaagaaagacggcgaagtgcggggcagcatcaacagattcaagaccagcgactacgtgaaagaagccaaacagctgctgaaggtgcagaaggcctaccaccagctggaccagagcttcatcgacacctacatcgacctgctggaaacccggcggacctactatgagggacctggcgagggcagccccttcggctggaaggacatcaaagaatggtacgagatgctgatgggccactgcacctacttccccgaggaactgcggagcgtgaagtacgcctacaacgccgacctgtacaacgccctgaacgacctgaacaatctcgtgatcaccagggacgagaacgagaagctggaatattacgagaagttccagatcatcgagaacgtgttcaagcagaagaagaagcccaccctgaagcagatcgccaaagaaatcctcgtgaacgaagaggatattaagggctacagagtgaccagcaccggcaagcccgagttcaccaacctgaaggtgtaccacgacatcaaggacattaccgcccggaaagagattattgagaacgccgagctgctggatcagattgccaagatcctgaccatctaccagagcagcgaggacatccaggaagaactgaccaatctgaactccgagctgacccaggaagagatcgagcagatctctaatctgaagggctataccggcacccacaacctgagcctgaaggccatcaacctgatcctggacgagctgtggcacaccaacgacaaccagatcgctatcttcaaccggctgaagctggtgcccaagaaggtggacctgtcccagcagaaagagatccccaccaccctggtggacgacttcatcctgagccccgtcgtgaagagaagcttcatccagagcatcaaagtgatcaacgccatcatcaagaagtacggcctgcccaacgacatcattatcgagctggcccgcgagaagaactccaaggacgcccagaaaatgatcaacgagatgcagaagcggaaccggcagaccaacgagcggatcgaggaaatcatccggaccaccggcaaagagaacgccaagtacctgatcgagaagatcaagctgcacgacatgcaggaaggcaagtgcctgtacagcctggaagccatccctctggaagatctgctgaacaaccccttcaactatgaggtggaccacatcatccccagaagcgtgtccttcgacaacagcttcaacaacaaggtgctcgtgaagcaggaagaagccagcaagaagggcaaccggaccccattccagtacctgagcagcagcgacagcaagatcagctacgaaaccttcaagaagcacatcctgaatctggccaagggcaagggcagaatcagcaagaccaagaaagagtatctgctggaagaacgggacatcaacaggttctccgtgcagaaagacttcatcaaccggaacctggtggataccagatacgccaccagaggcctgatgaacctgctgcggagctacttcagagtgaacaacctggacgtgaaagtgaagtccatcaatggcggcttcaccagctttctgcggcggaagtggaagtttaagaaagagcggaacaaggggtacaagcaccacgccgaggacgccctgatcattgccaacgccgatttcatcttcaaagagtggaagaaactggacaaggccaaaaaagtgatggaaaaccagatgttcgaggaaaagcaggccgagagcatgcccgagatcgaaaccgagcaggagtacaaagagatcttcatcaccccccaccagatcaagcacattaaggacttcaaggactacaagtacagccaccgggtggacaagaagcctaatagagagctgattaacgacaccctgtactccacccggaaggacgacaagggcaacaccctgatcgtgaacaatctgaacggcctgtacgacaaggacaatgacaagctgaaaaagctgatcaacaagagccccgaaaagctgctgatgtaccaccacgacccccagacctaccagaaactgaagctgattatggaacagtacggcgacgagaagaatcccctgtacaagtactacgaggaaaccgggaactacctgaccaagtactccaaaaaggacaacggccccgtgatcaagaagattaagtattacggcaacaaactgaacgcccatctggacatcaccgacgactaccccaacagcagaaacaaggtcgtgaagctgtccctgaagccctacagattcgacgtgtacctggacaatggcgtgtacaagttcgtgaccgtgaagaatctggatgtgatcaaaaaagaaaactactacgaagtgaatagcaagtgctatgaggaagctaagaagctgaagaagatcagcaaccaggccgagtttatcgcctccttctacaacaacgatctgatcaagatcaacggcgagctgtatagagtgatcggcgtgaacaacgacctgctgaaccggatcgaagtgaacatgatcgacatcacctaccgcgagtacctggaaaacatgaacgacaagaggccccccaggatcattaagacaatcgcctccaagacccagagcattaagaagtacagcacagacattctgggcaacctgtatgaagtgaaatctaagaagcaccctcagatcatcaaaaagggcaaaaggccggcggccacgaaaaaggccggccaggcaaaaaagaaaaagggatccggacgggctgacgcattggacgattttgatctggatatgctgggaagtgacgccctcgatgattttgaccttgacatgcttggttcggatgcccttgatgactttgacctcgacatgctcggcagtgacgcccttgatgatttcgacctggacatgctgattaactgtacaggcagtggagagggcagaggaagtctgctaacatgcggtgacgtcgaggagaatcctggcccaatggccaagcctttgtctcaagaagaatccaccctcattgaaagagcaacggctacaatcaacagcatccccatctctgaagactacagcgtcgccagcgcagctctctctagcgacggccgcatcttcactggtgtcaatgtatatcattttactgggggaccttgtgcagaactcgtggtgctgggcactgctgctgctgcggcagctggcaacctgacttgtatcgtcgcgatcggaaatgagaacaggggcatcttgagcccctgcggacggtgccgacaggtgcttctcgatctgcatcctgggatcaaagccatagtgaaggacagtgatggacagccgacggcagttgggattcgtgaattgctgccctctggttatgtgtgggagggctaagaattcctagagctcgctgatcagcctcgactgtgccttctagttgccagccatctgttgtttgcccctcccccgtgccttccttgaccctggaaggtgccactcccactgtcctttcctaataaaatgaggaaattgcatcgcattgtctgagtaggtgtcattctattctggggggtggggtggggcaggacagcaagggggaggattgggaagagaatagcaggcatgctggggaggtaccgagggcctatttcccatgattccttcatatttgcatatacgatacaaggctgttagagagataattggaattaatttgactgtaaacacaaagatattagtacaaaatacgtgacgtagaaagtaataatttcttgggtagtttgcagttttaaaattatgttttaaaatggactatcatatgcttaccgtaacttgaaagtatttcgatttcttggctttatatatcttgtggaaaggacgaaacaccggcagggctggactccccctcgttttagtactctggaaacagaatctactaaaacaaggcaaaatgccgtgtttatctcgtcaacttgttggcgagatttttgcggccgcaggaacccctagtgatggagttggccactccctctctgcgcgctcgctcgctcactgaggccgggcgaccaaaggtcgcccgacgcccgggctttgcccgggcggcctcagtgagcgagcgagcgcgcagctgcctgcaggggcgcctgatgcggtattttctccttacgcatctgtgcggtatttcacaccgcatacgtcaaagcaaccatagtacgcgccctgtagcggcgcattaagcgcggcgggtgtggtggttacgcgcagcgtgaccgctacacttgccagcgccttagcgcccgctcctttcgctttcttcccttcctttctcgccacgttcgccggctttccccgtcaagctctaaatcgggggctccctttagggttccgatttagtgctttacggcacctcgaccccaaaaaacttgatttgggtgatggttcacgtagtgggccatcgccctgatagacggtttttcgccctttgacgttggagtccacgttctttaatagtggactcttgttccaaactggaacaacactcaactctatctcgggctattcttttgatttataagggattttgccgatttcggtctattggttaaaaaatgagctgatttaacaaaaatttaacgcgaattttaacaaaatattaacgtttacaattttatggtgcactctcagtacaatctgctctgatgccgcatagttaagccagccccgacacccgccaacacccgctgacgcgccctgacgggcttgtctgctcccggcatccgcttacagacaagctgtgaccgtctccgggagctgcatgtgtcagaggttttcaccgtcatcaccgaaacgcgcgagacgaaagggcctcgtgatacgcctatttttataggttaatgtcatgataataatggtttcttagacgtcaggtggcacttttcggggaaatgtgcgcggaacccctatttgtttatttttctaaatacattcaaatatgtatccgctcatgagacaataaccctgataaatgcttcaataatattgaaaaaggaagagtatgagtattcaacatttccgtgtcgcccttattcccttttttgcggcattttgccttcctgtttttgctcacccagaaacgctggtgaaagtaaaagatgctgaagatcagttgggtgcacgagtgggttacatcgaactggatctcaacagcggtaagatccttgagagttttcgccccgaagaacgttttccaatgatgagcacttttaaagttctgctatgtggcgcggtattatcccgtattgacgccgggcaagagcaactcggtcgccgcatacactattctcagaatgacttggttgagtactcaccagtcacagaaaagcatcttacggatggcatgacagtaagagaattatgcagtgctgccataaccatgagtgataacactgcggccaacttacttctgacaacgatcggaggaccgaaggagctaaccgcttttttgcacaacatgggggatcatgtaactcgccttgatcgttgggaaccggagctgaatgaagccataccaaacgacgagcgtgacaccacgatgcctgtagcaatggcaacaacgttgcgcaaactattaactggcgaactacttactctagcttcccggcaacaattaatagactggatggaggcggataaagttgcaggaccacttctgcgctcggcccttccggctggctggtttattgctgataaatctggagccggtgagcgtggaagccgcggtatcattgcagcactggggccagatggtaagccctcccgtatcgtagttatctacacgacggggagtcaggcaactatggatgaacgaaatagacagatcgctgagataggtgcctcactgattaagcattggtaactgtcagaccaagtttactcatatatactttagattgatttaaaacttcatttttaatttaaaaggatctaggtgaagatcctttttgataatctcatgaccaaaatcccttaacgtgagttttcgttccactgagcgtcagaccccgtagaaaagatcaaaggatcttcttgagatcctttttttctgcgcgtaatctgctgcttgcaaacaaaaaaaccaccgctaccagcggtggtttgtttgccggatcaagagctaccaactctttttccgaaggtaactggcttcagcagagcgcagataccaaatactgttcttctagtgtagccgtagttaggccaccacttcaagaactctgtagcaccgcctacatacctcgctctgctaatcctgttaccagtggctgctgccagtggcgataagtcgtgtcttaccgggttggactcaagacgatagttaccggataaggcgcagcggtcgggctgaacggggggttcgtgcacacagcccagcttggagcgaacgacctacaccgaactgagatacctacagcgtgagctatgagaaagcgccacgcttcccgaagggagaaaggcggacaggtatccggtaagcggcagggtcggaacaggagagcgcacgagggagcttccagggggaaacgcctggtatctttatagtcctgtcgggtttcgccacctctgacttgagcgtcgatttttgtgatgctcgtcaggggggcggagcctatggaaaaacgccagcaacgcggcctttttacggttcctggccttttgctggccttttgctcacatgt

SEQ ID NO: 84 - RNA, 7996 nt, synthetic construct
  source 1..7996: mol_type = other RNA
cctgcaggcagctgcgcgctcgctcgctcactgaggccgcccgggcgtcgggcgacctttggtcgcccggcctcagtgagcgagcgagcgcgcagagagggagtggccaactccatcactaggggttcctgcggcctctagactcgaggcgttgacattgattattgactagttattaatagtaatcaattacggggtcattagttcatagcccatatatggagttccgcgttacataacttacggtaaatggcccgcctggctgaccgcccaacgacccccgcccattgacgtcaataatgacgtatgttcccatagtaacgccaatagggactttccattgacgtcaatgggtggagtatttacggtaaactgcccacttggcagtacatcaagtgtatcatatgccaagtacgccccctattgacgtcaatgacggtaaatggcccgcctggcattatgcccagtacatgaccttatgggactttcctacttggcagtacatctacgtattagtcatcgctattaccatggtgatgcggttttggcagtacatcaatgggcgtggatagcggtttgactcacggggatttccaagtctccaccccattgacgtcaatgggagtttgttttggcaccaaaatcaacgggactttccaaaatgtcgtaacaactccgccccattgacgcaaatgggcggtaggcgtgtacggtgggaggtctatataagcagagctctctggctaactaccggtgccaccatggccccaaagaagaagcggaaggtcggtatccacggagtcccagcagccaagcggaactacatcctgggcctggccatcggcatcaccagcgtgggctacggcatcatcgactacgagacacgggacgtgatcgatgccggcgtgcggctgttcaaagaggccaacgtggaaaacaacgagggcaggcggagcaagagaggcgccagaaggctgaagcggcggaggcggcatagaatccagagagtgaagaagctgctgttcgactacaacctgctgaccgaccacagcgagctgagcggcatcaacccctacgaggccagagtgaagggcctgagccagaagctgagcgaggaagagttctctgccgccctgctgcacctggccaagagaagaggcgtgcacaacgtgaacgaggtggaagaggacaccggcaacgagctgtccaccaaagagcagatcagccggaacagcaaggccctggaagagaaatacgtggccgaactgcagctggaacggctgaagaaagacggcgaagtgcggggcagcatcaacagattcaagaccagcgactacgtgaaagaagccaaacagctgctgaaggtgcagaaggcctaccaccagctggaccagagcttcatcgacacctacatcgacctgctggaaacccggcggacctactatgagggacctggcgagggcagccccttcggctggaaggacatcaaagaatggtacgagatgctgatgggccactgcacctacttccccgaggaactgcggagcgtgaagtacgcctacaacgccgacctgtacaacgccctgaacgacctgaacaatctcgtgatcaccagggacgagaacgagaagctggaatattacgagaagttccagatcatcgagaacgtgttcaagcagaagaagaagcccaccctgaagcagatcgccaaagaaatcctcgtgaacgaagaggatattaagggctacagagtgaccagcaccggcaagcccgagttcaccaacctgaaggtgtaccacgacatcaaggacattaccgcccggaaagagattattgagaacgccgagctgctggatcagattgccaagatcctgaccatctaccagagcagcgaggacatccaggaagaactgaccaatctgaactccgagctgacccaggaagagatcgagcagatctctaatctgaagggctataccggcacccacaacctgagcctgaaggccatcaacctgatcctggacgagctgtggcacaccaacgacaaccagatcgctatcttcaaccggctgaagctggtgcccaagaaggtggacctgtcccagcagaaagagatccccaccaccctggtggacgacttcatcctgagccccgtcgtgaagagaagcttcatccagagcatcaaagtgatcaacgccatcatcaagaagtacggcctgcccaacgacatcattatcgagctggcccgcgagaagaactccaaggacgcccagaaaatgatcaacgagatgcagaagcggaaccggcagaccaacgagcggatcgaggaaatcatccggaccaccggcaaagagaacgccaagtacctgatcgagaagatcaagctgcacgacatgcaggaaggcaagtgcctgtacagcctggaagccatccctctggaagatctgctgaacaaccccttcaactatgaggtggaccacatcatccccagaagcgtgtccttcgacaacagcttcaacaacaaggtgctcgtgaagcaggaagaagccagcaagaagggcaaccggaccccattccagtacctgagcagcagcgacagcaagatcagctacgaaaccttcaagaagcacatcctgaatctggccaagggcaagggcagaatcagcaagaccaagaaagagtatctgctggaagaacgggacatcaacaggttctccgtgcagaaagacttcatcaaccggaacctggtggataccagatacgccaccagaggcctgatgaacctgctgcggagctacttcagagtgaacaacctggacgtgaaagtgaagtccatcaatggcggcttcaccagctttctgcggcggaagtggaagtttaagaaagagcggaacaaggggtacaagcaccacgccgaggacgccctgatcattgccaacgccgatttcatcttcaaagagtggaagaaactggacaaggccaaaaaagtgatggaaaaccagatgttcgaggaaaagcaggccgagagcatgcccgagatcgaaaccgagcaggagtacaaagagatcttcatcaccccccaccagatcaagcacattaaggacttcaaggactacaagtacagccaccgggtggacaagaagcctaatagagagctgattaacgacaccctgtactccacccggaaggacgacaagggcaacaccctgatcgtgaacaatctgaacggcctgtacgacaaggacaatgacaagctgaaaaagctgatcaacaagagccccgaaaagctgctgatgtaccaccacgacccccagacctaccagaaactgaagctgattatggaacagtacggcgacgagaagaatcccctgtacaagtactacgaggaaaccgggaactacctgaccaagtactccaaaaaggacaacggccccgtgatcaagaagattaagtattacggcaacaaactgaacgcccatctggacatcaccgacgactaccccaacagcagaaacaaggtcgtgaagctgtccctgaagccctacagattcgacgtgtacctggacaatggcgtgtacaagttcgtgaccgtgaagaatctggatgtgatcaaaaaagaaaactactacgaagtgaatagcaagtgctatgaggaagctaagaagctgaagaagatcagcaaccaggccgagtttatcgcctccttctacaacaacgatctgatcaagatcaacggcgagctgtatagagtgatcggcgtgaacaacgacctgctgaaccggatcgaagtgaacatgatcgacatcacctaccgcgagtacctggaaaacatgaacgacaagaggccccccaggatcattaagacaatcgcctccaagacccagagcattaagaagtacagcacagacattctgggcaacctgtatgaagtgaaatctaagaagcaccctcagatcatcaaaaagggcaaaaggccggcggccacgaaaaaggccggccaggcaaaaaagaaaaagggatccggacgggctgacgcattggacgattttgatctggatatgctgggaagtgacgccctcgatgattttgaccttgacatgcttggttcggatgcccttgatgactttgacctcgacatgctcggcagtgacgcccttgatgatttcgacctggacatgctgattaactgtacaggcagtggagagggcagaggaagtctgctaacatgcggtgacgtcgaggagaatcctggcccaatggccaagcctttgtctcaagaagaatccaccctcattgaaagagcaacggctacaatcaacagcatccccatctctgaagactacagcgtcgccagcgcagctctctctagcgacggccgcatcttcactggtgtcaatgtatatcattttactgggggaccttgtgcagaactcgtggtgctgggcactgctgctgctgcggcagctggcaacctgacttgtatcgtcgcgatcggaaatgagaacaggggcatcttgagcccctgcggacggtgccgacaggtgcttctcgatctgcatcctgggatcaaagccatagtgaaggacagtgatggacagccgacggcagttgggattcgtgaattgctgccctctggttatgtgtgggagggctaagaattcctagagctcgctgatcagcctcgactgtgccttctagttgccagccatctgttgtttgcccctcccccgtgccttccttgaccctggaaggtgccactcccactgtcctttcctaataaaatgaggaaattgcatcgcattgtctgagtaggtgtcattctattctggggggtggggtggggcaggacagcaagggggaggattgggaagagaatagcaggcatgctggggaggtaccgagggcctatttcccatgattccttcatatttgcatatacgatacaaggctgttagagagataattggaattaatttgactgtaaacacaaagatattagtacaaaatacgtgacgtagaaagtaataatttcttgggtagtttgcagttttaaaattatgttttaaaatggactatcatatgcttaccgtaacttgaaagtatttcgatttcttggctttatatatcttgtggaaaggacgaaacaccctagcccggtaatccttgagggttttagtactctggaaacagaatctactaaaacaaggcaaaatgccgtgtttatctcgtcaacttgttggcgagatttttgcggccgcaggaacccctagtgatggagttggccactccctctctgcgcgctcgctcgctcactgaggccgggcgaccaaaggtcgcccgacgcccgggctttgcccgggcggcctcagtgagcgagcgagcgcgcagctgcctgcaggggcgcctgatgcggtattttctccttacgcatctgtgcggtatttcacaccgcatacgtcaaagcaaccatagtacgcgccctgtagcggcgcattaagcgcggcgggtgtggtggttacgcgcagcgtgaccgctacacttgccagcgccttagcgcccgctcctttcgctttcttcccttcctttctcgccacgttcgccggctttccccgtcaagctctaaatcgggggctccctttagggttccgatttagtgctttacggcacctcgaccccaaaaaacttgatttgggtgatggttcacgtagtgggccatcgccctgatagacggtttttcgccctttgacgttggagtccacgttctttaatagtggactcttgttccaaactggaacaacactcaactctatctcgggctattcttttgatttataagggattttgccgatttcggtctattggttaaaaaatgagctgatttaacaaaaatttaacgcgaattttaacaaaatattaacgtttacaattttatggtgcactctcagtacaatctgctctgatgccgcatagttaagccagccccgacacccgccaacacccgctgacgcgccctgacgggcttgtctgctcccggcatccgcttacagacaagctgtgaccgtctccgggagctgcatgtgtcagaggttttcaccgtcatcaccgaaacgcgcgagacgaaagggcctcgtgatacgcctatttttataggttaatgtcatgataataatggtttcttagacgtcaggtggcacttttcggggaaatgtgcgcggaacccctatttgtttatttttctaaatacattcaaatatgtatccgctcatgagacaataaccctgataaatgcttcaataatattgaaaaaggaagagtatgagtattcaacatttccgtgtcgcccttattcccttttttgcggcattttgccttcctgtttttgctcacccagaaacgctggtgaaagtaaaagatgctgaagatcagttgggtgcacgagtgggttacatcgaactggatctcaacagcggtaagatccttgagagttttcgccccgaagaacgttttccaatgatgagcacttttaaagttctgctatgtggcgcggtattatcccgtattgacgccgggcaagagcaactcggtcgccgcatacactattctcagaatgacttggttgagtactcaccagtcacagaaaagcatcttacggatggcatgacagtaagagaattatgcagtgctgccataaccatgagtgataacactgcggccaacttacttctgacaacgatcggaggaccgaaggagctaaccgcttttttgcacaacatgggggatcatgtaactcgccttgatcgttgggaaccggagctgaatgaagccataccaaacgacgagcgtgacaccacgatgcctgtagcaatggcaacaacgttgcgcaaactattaactggcgaactacttactctagcttcccggcaacaattaatagactggatggaggcggataaagttgcaggaccacttctgcgctcggcccttccggctggctggtttattgctgataaatctggagccggtgagcgtggaagccgcggtatcattgcagcactggggccagatggtaagccctcccgtatcgtagttatctacacgacggggagtcaggcaactatggatgaacgaaatagacagatcgctgagataggtgcctcactgattaagcattggtaactgtcagaccaagtttactcatatatactttagattgatttaaaacttcatttttaatttaaaaggatctaggtgaagatcctttttgataatctcatgaccaaaatcccttaacgtgagttttcgttccactgagcgtcagaccccgtagaaaagatcaaaggatcttcttgagatcctttttttctgcgcgtaatctgctgcttgcaaacaaaaaaaccaccgctaccagcggtggtttgtttgccggatcaagagctaccaactctttttccgaaggtaactggcttcagcagagcgcagataccaaatactgttcttctagtgtagccgtagttaggccaccacttcaagaactctgtagcaccgcctacatacctcgctctgctaatcctgttaccagtggctgctgccagtggcgataagtcgtgtcttaccgggttggactcaagacgatagttaccggataaggcgcagcggtcgggctgaacggggggttcgtgcacacagcccagcttggagcgaacgacctacaccgaactgagatacctacagcgtgagctatgagaaagcgccacgcttcccgaagggagaaaggcggacaggtatccggtaagcggcagggtcggaacaggagagcgcacgagggagcttccagggggaaacgcctggtatctttatagtcctgtcgggtttcgccacctctgacttgagcgtcgatttttgtgatgctcgtcaggggggcggagcctatggaaaaacgccagcaacgcggcctttttacggttcctggccttttgctggccttttgctcacatgt

SEQ ID NO: 85 - RNA, 7996 nt, synthetic construct; identical to SEQ ID NO: 83
  source 1..7996: mol_type = other RNA

SEQ ID NO: 86 - RNA, 7996 nt, synthetic construct
  source 1..7996: mol_type = other RNA
cctgcaggcagctgcgcgctcgctcgctcactgaggccgcccgggcgtcgggcgacctttggtcgcccggcctcagtgagcgagcgagcgcgcagagagggagtggccaactccatcactaggggttcctgcggcctctagactcgaggcgttgacattgattattgactagttattaatagtaatcaattacggggtcattagttcatagcccatatatggagttccgcgttacataacttacggtaaatggcccgcctggctgaccgcccaacgacccccgcccattgacgtcaataatgacgtatgttcccatagtaacgccaatagggactttccattgacgtcaatgggtggagtatttacggtaaactgcccacttggcagtacatcaagtgtatcatatgccaagtacgccccctattgacgtcaatgacggtaaatggcccgcctggcattatgcccagtacatgaccttatgggactttcctacttggcagtacatctacgtattagtcatcgctattaccatggtgatgcggttttggcagtacatcaatgggcgtggatagcggtttgactcacggggatttccaagtctccaccccattgacgtcaatgggagtttgttttggcaccaaaatcaacgggactttccaaaatgtcgtaacaactccgccccattgacgcaaatgggcggtaggcgtgtacggtgggaggtctatataagcagagctctctggctaactaccggtgccaccatggccccaaagaagaagcggaaggtcggtatccacggagtcccagcagccaagcggaactacatcctgggcctggccatcggcatcaccagcgtgggctacggcatcatcgactacgagacacgggacgtgatcgatgccggcgtgcggctgttcaaagaggccaacgtggaaaacaacgagggcaggcggagcaagagaggcgccagaaggctgaagcggcggaggcggcatagaatccagagagtgaagaagctgctgttcgactacaacctgctgaccgaccacagcgagctgagcggcatcaacccctacgaggccagagtgaagggcctgagccagaagctgagcgaggaagagttctctgccgccctgctgcacctggccaagagaagaggcgtgcacaacgtgaacgaggtggaagaggacaccggcaacgagctgtccaccaaagagcagatcagccggaacagcaaggccctggaagagaaatacgtggccgaactgcagctggaacggctgaagaaagacggcgaagtgcggggcagcatcaacagattcaagaccagcgactacgtgaaagaagccaaacagctgctgaaggtgcagaaggcctaccaccagctggaccagagcttcatcgacacctacatcgacctgctggaaacccggcggacctactatgagggacctggcgagggcagccccttcggctggaaggacatcaaagaatggtacgagatgctgatgggccactgcacctacttccccgaggaactgcggagcgtgaagtacgcctacaacgccgacctgtacaacgccctgaacgacctgaacaatctcgtgatcaccagggacgagaacgagaagctggaatattacgagaagttccagatcatcgagaacgtgttcaagcagaagaagaagcccaccctgaagcagatcgccaaagaaatcctcgtgaacgaagaggatattaagggctacagagtgaccagcaccggcaagcccgagttcaccaacctgaaggtgtaccacgacatcaaggacattaccgcccggaaagagattattgagaacgccgagctgctggatcagattgccaagatcctgaccatctaccagagcagcgaggacatccaggaagaactgaccaatctgaactccgagctgacccaggaagagatcgagcagatctctaatctgaagggctataccggcacccacaacctgagcctgaaggccatcaacctgatcctggacgagctgtggcacaccaacgacaaccagatcgctatcttcaaccggctgaagctggtgcccaagaaggtggacctgtcccagcagaaagagatccccaccaccctggtggacgacttcatcctgagccccgtcgtgaagagaagcttcatccagagcatcaaagtgatcaacgccatcatcaagaagtacggcctgcccaacgacatcattatcgagctggcccgcgagaagaactccaaggacgcccagaaaatgatcaacgagatgcagaagcggaaccggcagaccaacgagcggatcgaggaaatcatccggaccaccggcaaagagaacgccaagtacctgatcgagaagatcaagctgcacgacatgcaggaaggcaagtgcctgtacagcctggaagccatccctctggaagatctgctgaacaaccccttcaactatgaggtggaccacatcatccccagaagcgtgtccttcgacaacagcttcaacaacaaggtgctcgtgaagcaggaagaagccagcaagaagggcaaccggaccccattccagtacctgagcagcagcgacagcaagatcagctacgaaaccttcaagaagcacatcctgaatctggccaagggcaagggcagaatcagcaagaccaagaaagagtatctgctggaagaacgggacatcaacaggttctccgtgcagaaagacttcatcaaccggaacctggtggataccagatacgccaccagaggcctgatgaacctgctgcggagctacttcagagtgaacaacctggacgtgaaagtgaagtccatcaatggcggcttcaccagctttctgcggcggaagtggaagtttaagaaagagcggaacaaggggtacaagcaccacgccgaggacgccctgatcattgccaacgccgatttcatcttcaaagagtggaagaaactggacaaggccaaaaaagtgatggaaaaccagatgttcgaggaaaagcaggccgagagcatgcccgagatcgaaaccgagcaggagtacaaagagatcttcatcaccccccaccagatcaagcacattaaggacttcaaggactacaagtacagccaccgggtggacaagaagcctaatagagagctgattaacgacaccctgtactccacccggaaggacgacaagggcaacaccctgatcgtgaacaatctgaacggcctgtacgacaaggacaatgacaagctgaaaaagctgatcaacaagagccccgaaaagctgctgatgtaccaccacgacccccagacctaccagaaactgaagctgattatggaacagtacggcgacgagaagaatcccctgtacaagtactacgaggaaaccgggaactacctgaccaagtactccaaaaaggacaacggccccgtgatcaagaagattaagtattacggcaacaaactgaacgcccatctggacatcaccgacgactaccccaacagcagaaacaaggtcgtgaagctgtccctgaagccctacagattcgacgtgtacctggacaatggcgtgtacaagttcgtgaccgtgaagaatctggatgtgatcaaaaaagaaaactactacgaagtgaatagcaagtgctatgaggaagctaagaagctgaagaagatcagcaaccaggccgagtttatcgcctccttctacaacaacgatctgatcaagatcaacggcgagctgtatagagtgatcggcgtgaacaacgacctgctgaaccggatcgaagtgaacatgatcgacatcacctaccgcgagtacctggaaaacatgaacgacaagaggccccccaggatcattaagacaatcgcctccaagacccagagcattaagaagtacagcacagacattctgggcaacctgtatgaagtgaaatctaagaagcaccctcagatcatcaaaaagggcaaaaggccggcggccacgaaaaaggccggccaggcaaaaaagaaaaagggatccggacgggctgacgcattggacgattttgatctggatatgctgggaagtgacgccctcgatgattttgaccttgacatgcttggttcggatgcccttgatgactttgacctcgacatgctcggcagtgacgcccttgatgatttcgacctggacatgctgattaactgtacaggcagtggagagggcagaggaagtctgctaacatgcggtgacgtcgaggagaatcctggcccaatggccaagcctttgtctcaagaagaatccaccctcattgaaagagcaacggctacaatcaacagcatccccatctctgaagactacagcgtcgccagcgcagctctctctagcgacggccgcatcttcactggtgtcaatgtatatcattttactgggggaccttgtgcagaactcgtggtgctgggcactgctgctgctgcggcagctggcaacctgacttgtatcgtcgcgatcggaaatgagaacaggggcatcttgagcccctgcggacggtgccgacaggtgcttctcgatctgcatcctgggatcaaagccatagtgaaggacagtgatggacagccgacggcagttgggattcgtgaattgctgccctctggttatgtgtgggagggctaagaattcctagagctcgctgatcagcctcgactgtgccttctagttgccagccatctgttgtttgcccctcccccgtgccttccttgaccctggaaggtgccactcccactgtcctttcctaataaaatgaggaaattgcatcgcattgtctgagtaggtgtcattctattctggggggtggggtggggcaggacagcaagggggaggattgggaagagaatagcaggcatgctggggaggtaccgagggcctatttcccatgattccttcatatttgcatatacgatacaaggctgttagagagataattggaattaatttgactgtaaacacaaagatattagtacaaaatacgtgacgtagaaagtaataatttcttgggtagtttgcagttttaaaattatgttttaaaatggactatcatatgcttaccgtaacttgaaagtatttcgatttcttggctttatatatcttgtggaaaggacgaaacacctcctagcccggtaatccttgagttttagtactctggaaacagaatctactaaaacaaggcaaaatgccgtgtttatctcgtcaacttgttggcgagatttttgcggccgcaggaacccctagtgatggagttggccactccctctctgcgcgctcgctcgctcactgaggccgggcgaccaaaggtcgcccgacgcccgggctttgcccgggcggcctcagtgagcgagcgagcgcgcagctgcctgcaggggcgcctgatgcggtattttctccttacgcatctgtgcggtatttcacaccgcatacgtcaaagcaaccatagtacgcgccctgtagcggcgcattaagcgcggcgggtgtggtggttacgcgcagcgtgaccgctacacttgccagcgccttagcgcccgctcctttcgctttcttcccttcctttctcgccacgttcgccggctttccccgtcaagctctaaatcgggggctccctttagggttccgatttagtgctttacggcacctcgaccccaaaaaacttgatttgggtgatggttcacgtagtgggccatcgccctgatagacggtttttcgccctttgacgttggagtccacgttctttaatagtggactcttgttccaaactggaacaacactcaactctatctcgggctattcttttgatttataagggattttgccgatttcggtctattggttaaaaaatgagctgatttaacaaaaatttaacgcgaattttaacaaaatattaacgtttacaattttatggtgcactctcagtacaatctgctctgatgccgcatagttaagccagccccgacacccgccaacacccgctgacgcgccctgacgggcttgtctgctcccggcatccgcttacagacaagctgtgaccgtctccgggagctgcatgtgtcagaggttttcaccgtcatcaccgaaacgcgcgagacgaaagggcctcgtgatacgcctatttttataggttaatgtcatgataataatggtttcttagacgtcaggtggcacttttcggggaaatgtgcgcggaacccctatttgtttatttttctaaatacattcaaatatgtatccgctcatgagacaataaccctgataaatgcttcaataatattgaaaaaggaagagtatgagtattcaacatttccgtgtcgcccttattcccttttttgcggcattttgccttcctgtttttgctcacccagaaacgctggtgaaagtaaaagatgctgaagatcagttgggtgcacgagtgggttacatcgaactggatctcaacagcggtaagatccttgagagttttcgccccgaagaacgttttccaatgatgagcacttttaaagttctgctatgtggcgcggtattatcccgtattgacgccgggcaagagcaactcggtcgccgcatacactattctcagaatgacttggttgagtactcaccagtcacagaaaagcatcttacggatggcatgacagtaagagaattatgcagtgctgccataaccatgagtgataacactgcggccaacttacttctgacaacgatcggaggaccgaaggagctaaccgcttttttgcacaacatgggggatcatgtaactcgccttgatcgttgggaaccggagctgaatgaagccataccaaacgacgagcgtgacaccacgatgcctgtagcaatggcaacaacgttgcgcaaactattaactggcgaactacttactctagcttcccggcaacaattaatagactggatggaggcggataaagttgcaggaccacttctgcgctcggcccttccggctggctggtttattgctgataaatctggagccggtgagcgtggaagccgcggtatcattgcagcactggggccagatggtaagccctcccgtatcgtagttatctacacgacggggagtcaggcaactatggatgaacgaaatagacagatcgctgagataggtgcctcactgattaagcattggtaactgtcagaccaagtttactcatatatactttagattgatttaaaacttcatttttaatttaaaaggatctaggtgaagatcctttttgataatctcatgaccaaaatcccttaacgtgagttttcgttccactgagcgtcagaccccgtagaaaagatcaaaggatcttcttgagatcctttttttctgcgcgtaatctgctgcttgcaaacaaaaaaaccaccgctaccagcggtggtttgtttgccggatcaagagctaccaactctttttccgaaggtaactggcttcagcagagcgcagataccaaatactgttcttctagtgtagccgtagttaggccaccacttcaagaactctgtagcaccgcctacatacctcgctctgctaatcctgttaccagtggctgctgccagtggcgataagtcgtgtcttaccgggttggactcaagacgatagttaccggataaggcgcagcggtcgggctgaacggggggttcgtgcacacagcccagcttggagcgaacgacctacaccgaactgagatacctacagcgtgagctatgagaaagcgccacgcttcccgaagggagaaaggcggacaggtatccggtaagcggcagggtcggaacaggagagcgcacgagggagcttccagggggaaacgcctggtatctttatagtcctgtcgggtttcgccacctctgacttgagcgtcgatttttgtgatgctcgtcaggggggcggagcctatggaaaaacgccagcaacgcggcctttttacggttcctggccttttgctggccttttgctcacatgt

SEQ ID NO: 87 - RNA, 21 nt, synthetic construct
  source 1..21: mol_type = other RNA
agcggggctagggctagagca

SEQ ID NO: 88 - RNA, 21 nt, synthetic construct
  source 1..21: mol_type = other RNA
gctgctgctactgccgctgca

SEQ ID NO: 89 - RNA, 21 nt, synthetic construct
  source 1..21: mol_type = other RNA
ctactgccgctgcagcggggc

SEQ ID NO: 90 - RNA, 7997 nt, synthetic construct
  source 1..7997: mol_type = other RNA
cctgcaggcagctgcgcgctcgctcgctcactgaggccgcccgggcgtcgggcgacctttggtcgcccggcctcagtgagcgagcgagcgcgcagagagggagtggccaactccatcactaggggttcctgcggcctctagactcgaggcgttgacattgattattgactagttattaatagtaatcaattacggggtcattagttcatagcccatatatggagttccgcgttacataacttacggtaaatggcccgcctggctgaccgcccaacgacccccgcccattgacgtcaataatgacgtatgttcccatagtaacgccaatagggactttccattgacgtcaatgggtggagtatttacggtaaactgcccacttggcagtacatcaagtgtatcatatgccaagtacgccccctattgacgtcaatgacggtaaatggcccgcctggcattatgcccagtacatgaccttatgggactttcctacttggcagtacatctacgtattagtcatcgctattaccatggtgatgcggttttggcagtacatcaatgggcgtggatagcggtttgactcacggggatttccaagtctccaccccattgacgtcaatgggagtttgttttggcaccaaaatcaacgggactttccaaaatgtcgtaacaactccgccccattgacgcaaatgggcggtaggcgtgtacggtgggaggtctatataagcagagctctctggctaactaccggtgccaccatggccccaaagaagaagcggaaggtcggtatccacggagtcccagcagccaagcggaactacatcctgggcctggccatcggcatcaccagcgtgggctacggcatcatcgactacgagacacgggacgtgatcgatgccggcgtgcggctgttcaaagaggccaacgtggaaaacaacgagggcaggcggagcaagagaggcgccagaaggctgaagcggcggaggcggcatagaatccagagagtgaagaagctgctgttcgactacaacctgctgaccgaccacagcgagctgagcggcatcaacccctacgaggccagagtgaagggcctgagccagaagctgagcgaggaagagttctctgccgccctgctgcacctggccaagagaagaggcgtgcacaacgtgaacgaggtggaagaggacaccggcaacgagctgtccaccaaagagcagatcagccggaacagcaaggccctggaagagaaatacgtggccgaactgcagctggaacggctgaagaaagacggcgaagtgcggggcagcatcaacagattcaagaccagcgactacgtgaaagaagccaaacagctgctgaaggtgcagaaggcctaccaccagctggaccagagcttcatcgacacctacatcgacctgctggaaacccggcggacctactatgagggacctggcgagggcagccccttcggctggaaggacatcaaagaatggtacgagatgctgatgggccactgcacctacttccccgaggaactgcggagcgtgaagtacgcctacaacgccgacctgtacaacgccctgaacgacctgaacaatctcgtgatcaccagggacgagaacgagaagctggaatattacgagaagttccagatcatcgagaacgtgttcaagcagaagaagaagcccaccctgaagcagatcgccaaagaaatcctcgtgaacgaagaggatattaagggctacagagtgaccagcaccggcaagcccgagttcaccaacctgaaggtgtaccacgacatcaaggacattaccgcccggaaagagattattgagaacgccgagctgctggatcagattgccaagatcctgaccatctaccagagcagcgaggacatccaggaagaactgaccaatctgaactccgagctgacccaggaagagatcgagcagatctctaatctgaagggctataccggcacccacaacctgagcctgaaggccatcaacctgatcctggacgagctgtggcacaccaacgacaaccagatcgctatcttcaaccggctgaagctggtgcccaagaaggtggacctgtcccagcagaaagagatccccaccaccctggtggacgacttcatcctgagccccgtcgtgaagagaagcttcatccagagcatcaaagtgatcaacgccatcatcaagaagtacggcctgcccaacgacatcattatcgagctggcccgcgagaagaactccaaggacgcccagaaaatgatcaacgagatgcagaagcggaaccggcagaccaacgagcggatcgaggaaatcatccggaccaccggcaaagagaacgccaagtacctgatcgagaagatcaagctgcacgacatgcaggaaggcaagtgcctgtacagcctggaagccatccctctggaagatctgctgaacaaccccttcaactatgaggtggaccacatcatccccagaagcgtgtccttcgacaacagcttcaacaacaaggtgctcgtgaagcaggaagaagccagcaagaagggcaaccggaccccattccagtacctgagcagcagcgacagcaagatcagctacgaaaccttcaagaagcacatcctgaatctggccaagggcaagggcagaatcagcaagaccaagaaagagtatctgctggaagaacgggacatcaacaggttctccgtgcagaaagacttcatcaaccggaacctggtggataccagatacgccaccagaggcctgatgaacctgctgcggagctacttcagagtgaacaacctggacgtgaaagtgaagtccatcaatggcggcttcaccagctttctgcggcggaagtggaagtttaagaaagagcggaacaaggggtacaagcaccacgccgaggacgccctgatcattgccaacgccgatttcatcttcaaagagtggaagaaactggacaaggccaaaaaagtgatggaaaaccagatgttcgaggaaaagcaggccgagagcatgcccgagatcgaaaccgagcaggagtacaaagagatcttcatcaccccccaccagatcaagcacattaaggacttcaaggactacaagtacagccaccgggtggacaagaagcctaatagagagctgattaacgacaccctgtactccacccggaaggacgacaagggcaacaccctgatcgtgaacaatctgaacggcctgtacgacaaggacaatgacaagctgaaaaagctgatcaacaagagccccgaaaagctgctgatgtaccaccacgacccccagacctaccagaaactgaagctgattatggaacagtacggcgacgagaagaatcccctgtacaagtactacgaggaaaccgggaactacctgaccaagtactccaaaaaggacaacggccccgtgatcaagaagattaagtattacggcaacaaactgaacgcccatctggacatcaccgacgactaccccaacagcagaaacaaggtcgtgaagctgtccctgaagccctacagattcgacgtgtacctggacaatggcgtgtacaagttcgtgaccgtgaagaatctggatgtgatcaaaaaagaaaactactacgaagtgaatagcaagtgctatgaggaagctaagaagctgaagaagatcagcaaccaggccgagtttatcgcctccttctacaacaacgatctgatcaagatcaacggcgagctgtatagagtgatcggcgtgaacaacgacctgctgaaccggatcgaagtgaacatgatcgacatcacctaccgcgagtacctggaaaacatgaacgacaagaggccccccaggatcattaagacaatcgcctccaagacccagagcattaagaagtacagcacagacattctgggcaacctgtatgaagtgaaatctaagaagcaccctcagatcatcaaaaagggcaaaaggccggcggccacgaaaaaggccggccaggcaaaaaagaaaaagggatccggacgggctgacgcattggacgattttgatctggatatgctgggaagtgacgccctcgatgattttgaccttgacatgcttggttcggatgcccttgatgactttgacctcgacatgctcggcagtgacgcccttgatgatttcgacctggacatgctgattaactgtacaggcagtggagagggcagaggaagtctgctaacatgcggtgacgtcgaggagaatcctggcccaatggccaagcctttgtctcaagaagaatccaccctcattgaaagagcaacggctacaatcaacagcatccccatctctgaagactacagcgtcgccagcgcagctctctctagcgacggccgcatcttcactggtgtcaatgtatatcattttactgggggaccttgtgcagaactcgtggtgctgggcactgctgctgctgcggcagctggcaacctgacttgtatcgtcgcgatcggaaatgagaacaggggcatcttgagcccctgcggacggtgccgacaggtgcttctcgatctgcatcctgggatcaaagccatagtgaaggacagtgatggacagccgacggcagttgggattcgtgaattgctgccctctggttatgtgtgggagggctaagaattcctagagctcgctgatcagcctcgactgtgccttctagttgccagccatctgttgtttgcccctcccccgtgccttccttgaccctggaaggtgccactcccactgtcctttcctaataaaatgaggaaattgcatcgcattgtctgagtaggtgtcattctattctggggggtggggtggggcaggacagcaagggggaggattgggaagagaatagcaggcatgctggggaggtaccgagggcctatttcccatgattccttcatatttgcatatacgatacaaggctgttagagagataattggaattaatttgactgtaaacacaaagatattagtacaaaatacgtgacgtagaaagtaataatttcttgggtagtttgcagttttaaaattatgttttaaaatggactatcatatgcttaccgtaacttgaaagtatttcgatttcttggctttatatatcttgtggaaaggacgaaacaccgagcggggctagggctagagcagttttagtactctggaaacagaatctactaaaacaaggcaaaatgccgtgtttatctcgtcaacttgttggcgagatttttgcggccgcaggaacccctagtgatggagttggccactccctctctgcgcgctcgctcgctcactgaggccgggcgaccaaaggtcgcccgacgcccgggctttgcccgggcggcctcagtgagcgagcgagcgcgcagctgcctgcaggggcgcctgatgcggtattttctccttacgcatctgtgcggtatttcacaccgcatacgtcaaagcaaccatagtacgcgccctgtagcggcgcattaagcgcggcgggtgtggtggttacgcgcagcgtgaccgctacacttgccagcgccttagcgcccgctcctttcgctttcttcccttcctttctcgccacgttcgccggctttccccgtcaagctctaaatcgggggctccctttagggttccgatttagtgctttacggcacctcgaccccaaaaaacttgatttgggtgatggttcacgtagtgggccatcgccctgatagacggtttttcgccctttgacgttggagtccacgttctttaatagtggactcttgttccaaactggaacaacactcaactctatctcgggctattcttttgatttataagggattttgccgatttcggtctattggttaaaaaatgagctgatttaacaaaaatttaacgcgaattttaacaaaatattaacgtttacaattttatggtgcactctcagtacaatctgctctgatgccgcatagttaagccagccccgacacccgccaacacccgctgacgcgccctgacgggcttgtctgctcccggcatccgcttacagacaagctgtgaccgtctccgggagctgcatgtgtcagaggttttcaccgtcatcaccgaaacgcgcgagacgaaagggcctcgtgatacgcctatttttataggttaatgtcatgataataatggtttcttagacgtcaggtggcacttttcggggaaatgtgcgcggaacccctatttgtttatttttctaaatacattcaaatatgtatccgctcatgagacaataaccctgataaatgcttcaataatattgaaaaaggaagagtatgagtattcaacatttccgtgtcgcccttattcccttttttgcggcattttgccttcctgtttttgctcacccagaaacgctggtgaaagtaaaagatgctgaagatcagttgggtgcacgagtgggttacatcgaactggatctcaacagcggtaagatccttgagagttttcgccccgaagaacgttttccaatgatgagcacttttaaagttctgctatgtggcgcggtattatcccgtattgacgccgggcaagagcaactcggtcgccgcatacactattctcagaatgacttggttgagtactcaccagtcacagaaaagcatcttacggatggcatgacagtaagagaattatgcagtgctgccataaccatgagtgataacactgcggccaacttacttctgacaacgatcggaggaccgaaggagctaaccgcttttttgcacaacatgggggatcatgtaactcgccttgatcgttgggaaccggagctgaatgaagccataccaaacgacgagcgtgacaccacgatgcctgtagcaatggcaacaacgttgcgcaaactattaactggcgaactacttactctagcttcccggcaacaattaatagactggatggaggcggataaagttgcaggaccacttctgcgctcggcccttccggctggctggtttattgctgataaatctggagccggtgagcgtggaagccgcggtatcattgcagcactggggccagatggtaagccctcccgtatcgtagttatctacacgacggggagtcaggcaactatggatgaacgaaatagacagatcgctgagataggtgcctcactgattaagcattggtaactgtcagaccaagtttactcatatatactttagattgatttaaaacttcatttttaatttaaaaggatctaggtgaagatcctttttgataatctcatgaccaaaatcccttaacgtgagttttcgttccactgagcgtcagaccccgtagaaaagatcaaaggatcttcttgagatcctttttttctgcgcgtaatctgctgcttgcaaacaaaaaaaccaccgctaccagcggtggtttgtttgccggatcaagagctaccaactctttttccgaaggtaactggcttcagcagagcgcagataccaaatactgttcttctagtgtagccgtagttaggccaccacttcaagaactctgtagcaccgcctacatacctcgctctgctaatcctgttaccagtggctgctgccagtggcgataagtcgtgtcttaccgggttggactcaagacgatagttaccggataaggcgcagcggtcgggctgaacggggggttcgtgcacacagcccagcttggagcgaacgacctacaccgaactgagatacctacagcgtgagctatgagaaagcgccacgcttcccgaagggagaaaggcggacaggtatccggtaagcggcagggtcggaacaggagagcgcacgagggagcttccagggggaaacgcctggtatctttatagtcctgtcgggtttcgccacctctgacttgagcgtcgatttttgtgatgctcgtcaggggggcggagcctatggaaaaacgccagcaacgcggcctttttacggttcctggccttttgctggccttttgctcacatgt

SEQ ID NO: 91 - RNA, 7997 nt, synthetic construct
  source 1..7997: mol_type = other RNA
cctgcaggcagctgcgcgctcgctcgctcactgaggccgcccgggcgtcgggcgacctttggtcgcccggcctcagtgagcgagcgagcgcgcagagagggagtggccaactccatcactaggggttcctgcggcctctagactcgaggcgttgacattgattattgactagttattaatagtaatcaattacggggtcattagttcatagcccatatatggagttccgcgttacataacttacggtaaatggcccgcctggctgaccgcccaacgacccccgcccattgacgtcaataatgacgtatgttcccatagtaacgccaatagggactttccattgacgtcaatgggtggagtatttacggtaaactgcccacttggcagtacatcaagtgtatcatatgccaagtacgccccctattgacgtcaatgacggtaaatggcccgcctggcattatgcccagtacatgaccttatgggactttcctacttggcagtacatctacgtattagtcatcgctattaccatggtgatgcggttttggcagtacatcaatgggcgtggatagcggtttgactcacggggatttccaagtctccaccccattgacgtcaatgggagtttgttttggcaccaaaatcaacgggactttccaaaatgtcgtaacaactccgccccattgacgcaaatgggcggtaggcgtgtacggtgggaggtctatataagcagagctctctggctaactaccggtgccaccatggccccaaagaagaagcggaaggtcggtatccacggagtcccagcagccaagcggaactacatcctgggcctggccatcggcatcaccagcgtgggctacggcatcatcgactacgagacacgggacgtgatcgatgccggcgtgcggctgttcaaagaggccaacgtggaaaacaacgagggcaggcggagcaagagaggcgccagaaggctgaagcggcggaggcggcatagaatccagagagtgaagaagctgctgttcgactacaacctgctgaccgaccacagcgagctgagcggcatcaacccctacgaggccagagtgaagggcctgagccagaagctgagcgaggaagagttctctgccgccctgctgcacctggccaagagaagaggcgtgcacaacgtgaacgaggtggaagaggacaccggcaacgagctgtccaccaaagagcagatcagccggaacagcaaggccctggaagagaaatacgtggccgaactgcagctggaacggctgaagaaagacggcgaagtgcggggcagcatcaacagattcaagaccagcgactacgtgaaagaagccaaacagctgctgaaggtgcagaaggcctaccaccagctggaccagagcttcatcgacacctacatcgacctgctggaaacccggcggacctactatgagggacctggcgagggcagccccttcggctggaaggacatcaaagaatggtacgagatgctgatgggccactgcacctacttccccgaggaactgcggagcgtgaagtacgcctacaacgccgacctgtacaacgccctgaacgacctgaacaatctcgtgatcaccagggacgagaacgagaagctggaatattacgagaagttccagatcatcgagaacgtgttcaagcagaagaagaagcccaccctgaagcagatcgccaaagaaatcctcgtgaacgaagaggatattaagggctacagagtgaccagcaccggcaagcccgagttcaccaacctgaaggtgtaccacgacatcaaggacattaccgcccggaaagagattattgagaacgccgagctgctggatcagattgccaagatcctgaccatctaccagagcagcgaggacatccaggaagaactgaccaatctgaactccgagctgacccaggaagagatcgagcagatctctaatctgaagggctataccggcacccacaacctgagcctgaaggccatcaacctgatcctggacgagctgtggcacaccaacgacaaccagatcgctatcttcaaccggctgaagctggtgcccaagaaggtggacctgtcccagcagaaagagatccccaccaccctggtggacgacttcatcctgagccccgtcgtgaagagaagcttcatccagagcatcaaagtgatcaacgccatcatcaagaagtacggcctgcccaacgacatcattatcgagctggcccgcgagaagaactccaaggacgcccagaaaatgatcaacgagatgcagaagcggaaccggcagaccaacgagcggatcgaggaaatcatccggaccaccggcaaagagaacgccaagtacctgatcgagaagatcaagctgcacgacatgcaggaaggcaagtgcctgtacagcctggaagccatccctctggaagatctgctgaacaaccccttcaactatgaggtggaccacatcatccccagaagcgtgtccttcgacaacagcttcaacaacaaggtgctcgtgaagcaggaagaagccagcaagaagggcaaccggaccccattccagtacctgagcagcagcgacagcaagatcagctacgaaaccttcaagaagcacatcctgaatctggccaagggcaagggcagaatcagcaagaccaagaaagagtatctgctggaagaacgggacatcaacaggttctccgtgcagaaagacttcatcaaccggaacctggtggataccagatacgccaccagaggcctgatgaacctgctgcggagctacttcagagtgaacaacctggacgtgaaagtgaagtccatcaatggcggcttcaccagctttctgcggcggaagtggaagtttaagaaagagcggaacaaggggtacaagcaccacgccgaggacgccctgatcattgccaacgccgatttcatcttcaaagagtggaagaaactggacaaggccaaaaaagtgatggaaaaccagatgttcgaggaaaagcaggccgagagcatgcccgagatcgaaaccgagcaggagtacaaagagatcttcatcaccccccaccagatcaagcacattaaggacttcaaggactacaagtacagccaccgggtggacaagaagcctaatagagagctgattaacgacaccctgtactccacccggaaggacgacaagggcaacaccctgatcgtgaacaatctgaacggcctgtacgacaaggacaatgacaagctgaaaaagctgatcaacaagagccccgaaaagctgctgatgtaccaccacgacccccagacctaccagaaactgaagctgattatggaacagtacggcgacgagaagaatcccctgtacaagtactacgaggaaaccgggaactacctgaccaagtactccaaaaaggacaacggccccgtgatcaagaagattaagtattacggcaacaaactgaacgcccatctggacatcaccgacgactaccccaacagcagaaacaaggtcgtgaagctgtccctgaagccctacagattcgacgtgtacctggacaatggcgtgtacaagttcgtgaccgtgaagaatctggatgtgatcaaaaaagaaaactactacgaagtgaatagcaagtgctatgaggaagctaagaagctgaagaagatcagcaaccaggccgagtttatcgcctccttctacaacaacgatctgatcaagatcaacggcgagctgtatagagtgatcggcgtgaacaacgacctgctgaaccggatcgaagtgaacatgatcgacatcacctaccgcgagtacctggaaaacatgaacgacaagaggccccccaggatcattaagacaatcgcctccaagacccagagcattaagaagtacagcacagacattctgggcaacctgtatgaagtgaaatctaagaagcaccctcagatcatcaaaaagggcaaaaggccggcggccacgaaaaaggccggccaggcaaaaaagaaaaagggatccggacgggctgacgcattggacgattttgatctggatatgctgggaagtgacgccctcgatgattttgaccttgacatgcttggttcggatgcccttgatgactttgacctcgacatgctcggcagtgacgcccttgatgatttcgacctggacatgctgattaactgtacaggcagtggagagggcagaggaagtctgctaacatgcggtgacgtcgaggagaatcctggcccaatggccaagcctttgtctcaagaagaatccaccctcattgaaagagcaacggctacaatcaacagcatccccatctctgaagactacagcgtcgccagcgcagctctctctagcgacggccgcatcttcactggtgtcaatgtatatcattttactgggggaccttgtgcagaactcgtggtgctgggcactgctgctgctgcggcagctggcaacctgacttgtatcgtcgcgatcggaaatgagaacaggggcatcttgagcccctgcggacggtgccgacaggtgcttctcgatctgcatcctgggatcaaagccatagtgaaggacagtgatggacagccgacggcagttgggattcgtgaattgctgccctctggttatgtgtgggagggctaagaattcctagagctcgctgatcagcctcgactgtgccttctagttgccagccatctgttgtttgcccctcccccgtgccttccttgaccctggaaggtgccactcccactgtcctttcctaataaaatgaggaaattgcatcgcattgtctgagtaggtgtcattctattctggggggtggggtggggcaggacagcaagggggaggattgggaagagaatagcaggcatgctggggaggtaccgagggcctatttcccatgattccttcatatttgcatatacgatacaaggctgttagagagataattggaattaatttgactgtaaacacaaagatattagtacaaaatacgtgacgtagaaagtaataatttcttgggtagtttgcagttttaaaattatgttttaaaatggactatcatatgcttaccgtaacttgaaagtatttcgatttcttggctttatatatcttgtggaaaggacgaaacaccggctgctgctactgccgctgcagttttagtactctggaaacagaatctactaaaacaaggcaaaatgccgtgtttatctcgtcaacttgttggcgagatttttgcggccgcaggaacccctagtgatggagttggccactccctctctgcgcgctcgctcgctcactgaggccgggcgaccaaaggtcgcccgacgcccgggctttgcccgggcggcctcagtgagcgagcgagcgcgcagctgcctgcaggggcgcctgatgcggtattttctccttacgcatctgtgcggtatttcacaccgcatacgtcaaagcaaccatagtacgcgccctgtagcggcgcattaagcgcggcgggtgtggtggttacgcgcagcgtgaccgctacacttgccagcgccttagcgcccgctcctttcgctttcttcccttcctttctcgccacgttcgccggctttccccgtcaagctctaaatcgggggctccctttagggttccgatttagtgctttacggcacctcgaccccaaaaaacttgatttgggtgatggttcacgtagtgggccatcgccctgatagacggtttttcgccctttgacgttggagtccacgttctttaatagtggactcttgttccaaactggaacaacactcaactctatctcgggctattcttttgatttataagggattttgccgatttcggtctattggttaaaaaatgagctgatttaacaaaaatttaacgcgaattttaacaaaatattaacgtttacaattttatggtgcactctcagtacaatctgctctgatgccgcatagttaagccagccccgacacccgccaacacccgctgacgcgccctgacgggcttgtctgctcccggcatccgcttacagacaagctgtgaccgtctccgggagctgcatgtgtcagaggttttcaccgtcatcaccgaaacgcgcgagacgaaagggcctcgtgatacgcctatttttataggttaatgtcatgataataatggtttcttagacgtcaggtggcacttttcggggaaatgtgcgcggaacccctatttgtttatttttctaaatacattcaaatatgtatccgctcatgagacaataaccctgataaatgcttcaataatattgaaaaaggaagagtatgagtattcaacatttccgtgtcgcccttattcccttttttgcggcattttgccttcctgtttttgctcacccagaaacgctggtgaaagtaaaagatgctgaagatcagttgggtgcacgagtgggttacatcgaactggatctcaacagcggtaagatccttgagagttttcgccccgaagaacgttttccaatgatgagcacttttaaagttctgctatgtggcgcggtattatcccgtattgacgccgggcaagagcaactcggtcgccgcatacactattctcagaatgacttggttgagtactcaccagtcacagaaaagcatcttacggatggcatgacagtaagagaattatgcagtgctgccataaccatgagtgataacactgcggccaacttacttctgacaacgatcggaggaccgaaggagctaaccgcttttttgcacaacatgggggatcatgtaactcgccttgatcgttgggaaccggagctgaatgaagccataccaaacgacgagcgtgacaccacgatgcctgtagcaatggcaacaacgttgcgcaaactattaactggcgaactacttactctagcttcccggcaacaattaatagactggatggaggcggataaagttgcaggaccacttctgcgctcggcccttccggctggctggtttattgctgataaatctggagccggtgagcgtggaagccgcggtatcattgcagcactggggccagatggtaagccctcccgtatcgtagttatctacacgacggggagtcaggcaactatggatgaacgaaatagacagatcgctgagataggtgcctcactgattaagcattggtaactgtcagaccaagtttactcatatatactttagattgatttaaaacttcatttttaatttaaaaggatctaggtgaagatcctttttgataatctcatgaccaaaatcccttaacgtgagttttcgttccactgagcgtcagaccccgtagaaaagatcaaaggatcttcttgagatcctttttttctgcgcgtaatctgctgcttgcaaacaaaaaaaccaccgctaccagcggtggtttgtttgccggatcaagagctaccaactctttttccgaaggtaactggcttcagcagagcgcagataccaaatactgttcttctagtgtagccgtagttaggccaccacttcaagaactctgtagcaccgcctacatacctcgctctgctaatcctgttaccagtggctgctgccagtggcgataagtcgtgtcttaccgggttggactcaagacgatagttaccggataaggcgcagcggtcgggctgaacggggggttcgtgcacacagcccagcttggagcgaacgacctacaccgaactgagatacctacagcgtgagctatgagaaagcgccacgcttcccgaagggagaaaggcggacaggtatccggtaagcggcagggtcggaacaggagagcgcacgagggagcttccagggggaaacgcctggtatctttatagtcctgtcgggtttcgccacctctgacttgagcgtcgatttttgtgatgctcgtcaggggggcggagcctatggaaaaacgccagcaacgcggcctttttacggttcctggccttttgctggccttttgctcacatgt

SEQ ID NO: 92 - RNA, 7997 nt, synthetic construct
  source 1..7997: mol_type = other RNA
cctgcaggcagctgcgcgctcgctcgctcactgaggccgcccgggcgtcgggcgacctttggtcgcccggcctcagtgagcgagcgagcgcgcagagagggagtggccaactccatcactaggggttcctgcggcctctagactcgaggcgttgacattgattattgactagttattaatagtaatcaattacggggtcattagttcatagcccatatatggagttccgcgttacataacttacggtaaatggcccgcctggctgaccgcccaacgacccccgcccattgacgtcaataatgacgtatgttcccatagtaacgccaatagggactttccattgacgtcaatgggtggagtatttacggtaaactgcccacttggcagtacatcaagtgtatcatatgccaagtacgccccctattgacgtcaatgacggtaaatggcccgcctggcattatgcccagtacatgaccttatgggactttcctacttggcagtacatctacgtattagtcatcgctattaccatggtgatgcggttttggcagtacatcaatgggcgtggatagcggtttgactcacggggatttccaagtctccaccccattgacgtcaatgggagtttgttttggcaccaaaatcaacgggactttccaaaatgtcgtaacaactccgccccattgacgcaaatgggcggtaggcgtgtacggtgggaggtctatataagcagagctctctggctaactaccggtgccaccatggccccaaagaagaagcggaaggtcggtatccacggagtcccagcagccaagcggaactacatcctgggcctggccatcggcatcaccagcgtgggctacggcatcatcgactacgagacacgggacgtgatcgatgccggcgtgcggctgttcaaagaggccaacgtggaaaacaacgagggcaggcggagcaagagaggcgccagaaggctgaagcggcggaggcggcatagaatccagagagtgaagaagctgctgttcgactacaacctgctgaccgaccacagcgagctgagcggcatcaacccctacgaggccagagtgaagggcctgagccagaagctgagcgaggaagagttctctgccgccctgctgcacctggccaagagaagaggcgtgcacaacgtgaacgaggtggaagaggacaccggcaacgagctgtccaccaaagagcagatcagccggaacagcaaggccctggaagagaaatacgtggccgaactgcagctggaacggctgaagaaagacggcgaagtgcggggcagcatcaacagattcaagaccagcgactacgtgaaagaagccaaacagctgctgaaggtgcagaaggcctaccaccagctggaccagagcttcatcgacacctacatcgacctgctggaaacccggcggacctactatgagggacctggcgagggcagccccttcggctggaaggacatcaaagaatggtacgagatgctgatgggccactgcacctacttccccgaggaactgcggagcgtgaagtacgcctacaacgccgacctgtacaacgccctgaacgacctgaacaatctcgtgatcaccagggacgagaacgagaagctggaatattacgagaagttccagatcatcgagaacgtgttcaagcagaagaagaagcccaccctgaagcagatcgccaaagaaatcctcgtgaacgaagaggatattaagggctacagagtgaccagcaccggcaagcccgagttcaccaacctgaaggtgtaccacgacatcaaggacattaccgcccggaaagagattattgagaacgccgagctgctggatcagattgccaagatcctgaccatctaccagagcagcgaggacatccaggaagaactgaccaatctgaactccgagctgacccaggaagagatcgagcagatctctaatctgaagggctataccggcacccacaacctgagcctgaaggccatcaacctgatcctggacgagctgtggcacaccaacgacaaccagatcgctatcttcaaccggctgaagctggtgcccaagaaggtggacctgtcccagcagaaagagatccccaccaccctggtggacgacttcatcctgagccccgtcgtgaagagaagcttcatccagagcatcaaagtgatcaacgccatcatcaagaagtacggcctgcccaacgacatcattatcgagctggcccgcgagaagaactccaaggacgcccagaaaatgatcaacgagatgcagaagcggaaccggcagaccaacgagcggatcgaggaaatcatccggaccaccggcaaagagaacgccaagtacctgatcgagaagatcaagctgcacgacatgcaggaaggcaagtgcctgtacagcctggaagccatccctctggaagatctgctgaacaaccccttcaactatgaggtggaccacatcatccccagaagcgtgtccttcgacaacagcttcaacaacaaggtgctcgtgaagcaggaagaagccagcaagaagggcaaccggaccccattccagtacctgagcagcagcgacagcaagatcagctacgaaaccttcaagaagcacatcctgaatctggccaagggcaagggcagaatcagcaagaccaagaaagagtatctgctggaagaacgggacatcaacaggttctccgtgcagaaagacttcatcaaccggaacctggtggataccagatacgccaccagaggcctgatgaacctgctgcggagctacttcagagtgaacaacctggacgtgaaagtgaagtccatcaatggcggcttcaccagctttctgcggcggaagtggaagtttaagaaagagcggaacaaggggtacaagcaccacgccgaggacgccctgatcattgccaacgccgatttcatcttcaaagagtggaagaaactggacaaggccaaaaaagtgatggaaaaccagatgttcgaggaaaagcaggccgagagcatgcccgagatcgaaaccgagcaggagtacaaagagatcttcatcaccccccaccagatcaagcacattaaggacttcaaggactacaagtacagccaccgggtggacaagaagcctaatagagagctgattaacgacaccctgtactccacccggaaggacgacaagggcaacaccctgatcgtgaacaatctgaacggcctgtacgacaaggacaatgacaagctgaaaaagctgatcaacaagagccccgaaaagctgctgatgtaccaccacgacccccagacctaccagaaactgaagctgattatggaacagtacggcgacgagaagaatcccctgtacaagtactacgaggaaaccgggaactacctgaccaagtactccaaaaaggacaacggccccgtgatcaagaagattaagtattacggcaacaaactgaacgcccatctggacatcaccgacgactaccccaacagcagaaacaaggtcgtgaagctgtccctgaagccctacagattcgacgtgtacctggacaatggcgtgtacaagttcgtgaccgtgaagaatctggatgtgatcaaaaaagaaaactactacgaagtgaatagcaagtgctatgaggaagctaagaagctgaagaagatcagcaaccaggccgagtttatcgcctccttctacaacaacgatctgatcaagatcaacggcgagctgtatagagtgatcggcgtgaacaacgacctgctgaaccggatcgaagtgaacatgatcgacatcacctaccgcgagtacctggaaaacatgaacgacaagaggccccccaggatcattaagacaatcgcctccaagacccagagcattaagaagtacagcacagacattctgggcaacctgtatgaagtgaaatctaagaagcaccctcagatcatcaaaaagggcaaaaggccggcggccacgaaaaaggccggccaggcaaaaaagaaaaagggatccggacgggctgacgcattggacgattttgatctggatatgctgggaagtgacgccctcgatgattttgaccttgacatgcttggttcggatgcccttgatgactttgacctcgacatgctcggcagtgacgcccttgatgatttcgacctggacatgctgattaactgtacaggcagtggagagggcagaggaagtctgctaacatgcggtgacgtcgaggagaatcctggcccaatggccaagcctttgtctcaagaagaatccaccctcattgaaagagcaacggctacaatcaacagcatccccatctctgaagactacagcgtcgccagcgcagctctctctagcgacggccgcatcttcactggtgtcaatgtatatcattttactgggggaccttgtgcagaactcgtggtgctgggcactgctgctgctgcggcagctggcaacctgacttgtatcgtcgcgatcggaaatgagaacaggggcatcttgagcccctgcggacggtgccgacaggtgcttctcgatctgcatcctgggatcaaagccatagtgaaggacagtgatggacagccgacggcagttgggattcgtgaattgctgccctctggttatgtgtgggagggctaagaattcctagagctcgctgatcagcctcgactgtgccttctagttgccagccatctgttgtttgcccctcccccgtgccttccttgaccctggaaggtgccactcccactgtcctttcctaataaaatgaggaaattgcatcgcattgtctgagtaggtgtcattctattctggggggtggggtggggcaggacagcaagggggaggattgggaagagaatagcaggcatgctggggaggtaccgagggcctatttcccatgattccttcatatttgcatatacgatacaaggctgttagagagataattggaattaatttgactgtaaacacaaagatattagtacaaaatacgtgacgtagaaagtaataatttcttgggtagtttgcagttttaaaattatgttttaaaatggactatcatatgcttaccgtaacttgaaagtatttcgatttcttggctttatatatcttgtggaaaggacgaaacaccgctactgccgctgcagcggggcgttttagtactctggaaacagaatctactaaaacaaggcaaaatgccgtgtttatctcgtcaacttgttggcgagatttttgcggccgcaggaacccctagtgatggagttggccactccctctctgcgcgctcgctcgctcactgaggccgggcgaccaaaggtcgcccgacgcccgggctttgcccgggcggcctcagtgagcgagcgagcgcgcagctgcctgcaggggcgcctgatgcggtattttctccttacgcatctgtgcggtatttcacaccgcatacgtcaaagcaaccatagtacgcgccctgtagcggcgcattaagcgcggcgggtgtggtggttacgcgcagcgtgaccgctacacttgccagcgccttagcgcccgctcctttcgctttcttcccttcctttctcgccacgttcgccggctttccccgtcaagctctaaatcgggggctccctttagggttccgatttagtgctttacggcacctcgaccccaaaaaacttgatttgggtgatggttcacgtagtgggccatcgccctgatagacggtttttcgccctttgacgttggagtccacgttctttaatagtggactcttgttccaaactggaacaacactcaactctatctcgggctattcttttgatttataagggattttgccgatttcggtctattggttaaaaaatgagctgatttaacaaaaatttaacgcgaattttaacaaaatattaacgtttacaattttatggtgcactctcagtacaatctgctctgatgccgcatagttaagccagccccgacacccgccaacacccgctgacgcgccctgacgggcttgtctgctcccggcatccgcttacagacaagctgtgaccgtctccgggagctgcatgtgtcagaggttttcaccgtcatcaccgaaacgcgcgagacgaaagggcctcgtgatacgcctatttttataggttaatgtcatgataataatggtttcttagacgtcaggtggcacttttcggggaaatgtgcgcggaacccctatttgtttatttttctaaatacattcaaatatgtatccgctcatgagacaataaccctgataaatgcttcaataatattgaaaaaggaagagtatgagtattcaacatttccgtgtcgcccttattcccttttttgcggcattttgccttcctgtttttgctcacccagaaacgctggtgaaagtaaaagatgctgaagatcagttgggtgcacgagtgggttacatcgaactggatctcaacagcggtaagatccttgagagttttcgccccgaagaacgttttccaatgatgagcacttttaaagttctgctatgtggcgcggtattatcccgtattgacgccgggcaagagcaactcggtcgccgcatacactattctcagaatgacttggttgagtactcaccagtcacagaaaagcatcttacggatggcatgacagtaagagaattatgcagtgctgccataaccatgagtgataacactgcggccaacttacttctgacaacgatcggaggaccgaaggagctaaccgcttttttgcacaacatgggggatcatgtaactcgccttgatcgttgggaaccggagctgaatgaagccataccaaacgacgagcgtgacaccacgatgcctgtagcaatggcaacaacgttgcgcaaactattaactggcgaactacttactctagcttcccggcaacaattaatagactggatggaggcggataaagttgcaggaccacttctgcgctcggcccttccggctggctggtttattgctgataaatctggagccggtgagcgtggaagccgcggtatcattgcagcactggggccagatggtaagccctcccgtatcgtagttatctacacgacggggagtcaggcaactatggatgaacgaaatagacagatcgctgagataggtgcctcactgattaagcattggtaactgtcagaccaagtttactcatatatactttagattgatttaaaacttcatttttaatttaaaaggatctaggtgaagatcctttttgataatctcatgaccaaaatcccttaacgtgagttttcgttccactgagcgtcagaccccgtagaaaagatcaaaggatcttcttgagatcctttttttctgcgcgtaatctgctgcttgcaaacaaaaaaaccaccgctaccagcggtggtttgtttgccggatcaagagctaccaactctttttccgaaggtaactggcttcagcagagcgcagataccaaatactgttcttctagtgtagccgtagttaggccaccacttcaagaactctgtagcaccgcctacatacctcgctctgctaatcctgttaccagtggctgctgccagtggcgataagtcgtgtcttaccgggttggactcaagacgatagttaccggataaggcgcagcggtcgggctgaacggggggttcgtgcacacagcccagcttggagcgaacgacctacaccgaactgagatacctacagcgtgagctatgagaaagcgccacgcttcccgaagggagaaaggcggacaggtatccggtaagcggcagggtcggaacaggagagcgcacgagggagcttccagggggaaacgcctggtatctttatagtcctgtcgggtttcgccacctctgacttgagcgtcgatttttgtgatgctcgtcaggggggcggagcctatggaaaaacgccagcaacgcggcctttttacggttcctggccttttgctggccttttgctcacatgt

SEQ ID NO: 93 - RNA, 21 nt, synthetic construct
  source 1..21: mol_type = other RNA
aatctccagtgcaggagcacg

SEQ ID NO: 94 - RNA, 21 nt, synthetic construct
  source 1..21: mol_type = other RNA
attggatattgggaagcaaat

SEQ ID NO: 95 - RNA, 21 nt, synthetic construct
  source 1..21: mol_type = other RNA
tgtatagctgcagattggata

SEQ ID NO: 96 - RNA, 7997 nt, synthetic construct
  source 1..7997: mol_type = other RNA
cctgcaggcagctgcgcgctcgctcgctcactgaggccgcccgggcgtcgggcgacctttggtcgcccggcctcagtgagcgagcgagcgcgcagagagggagtggccaactccatcactaggggttcctgcggcctctagactcgaggcgttgacattgattattgactagttattaatagtaatcaattacggggtcattagttcatagcccatatatggagttccgcgttacataacttacggtaaatggcccgcctggctgaccgcccaacgacccccgcccattgacgtcaataatgacgtatgttcccatagtaacgccaatagggactttccattgacgtcaatgggtggagtatttacggtaaactgcccacttggcagtacatcaagtgtatcatatgccaagtacgccccctattgacgtcaatgacggtaaatggcccgcctggcattatgcccagtacatgaccttatgggactttcctacttggcagtacatctacgtattagtcatcgctattaccatggtgatgcggttttggcagtacatcaatgggcgtggatagcggtttgactcacggggatttccaagtctccaccccattgacgtcaatgggagtttgttttggcaccaaaatcaacgggactttccaaaatgtcgtaacaactccgccccattgacgcaaatgggcggtaggcgtgtacggtgggaggtctatataagcagagctctctggctaactaccggtgccaccatggccccaaagaagaagcggaaggtcggtatccacggagtcccagcagccaagcggaactacatcctgggcctggccatcggcatcaccagcgtgggctacggcatcatcgactacgagacacgggacgtgatcgatgccggcgtgcggctgttcaaagaggccaacgtggaaaacaacgagggcaggcggagcaagagaggcgccagaaggctgaagcggcggaggcggcatagaatccagagagtgaagaagctgctgttcgactacaacctgctgaccgaccacagcgagctgagcggcatcaacccctacgaggccagagtgaagggcctgagccagaagctgagcgaggaagagttctctgccgccctgctgcacctggccaagagaagaggcgtgcacaacgtgaacgaggtggaagaggacaccggcaacgagctgtccaccaaagagcagatcagccggaacagcaaggccctggaagagaaatacgtggccgaactgcagctggaacggctgaagaaagacggcgaagtgcggggcagcatcaacagattcaagaccagcgactacgtgaaagaagccaaacagctgctgaaggtgcagaaggcctaccaccagctggaccagagcttcatcgacacctacatcgacctgctggaaacccggcggacctactatgagggacctggcgagggcagccccttcggctggaaggacatcaaagaatggtacgagatgctgatgggccactgcacctacttccccgaggaactgcggagcgtgaagtacgcctacaacgccgacctgtacaacgccctgaacgacctgaacaatctcgtgatcaccagggacgagaacgagaagctggaatattacgagaagttccagatcatcgagaacgtgttcaagcagaagaagaagcccaccctgaagcagatcgccaaagaaatcctcgtgaacgaagaggatattaagggctacagagtgaccagcaccggcaagcccgagttcaccaacctgaaggtgtaccacgacatcaaggacattaccgcccggaaagagattattgagaacgccgagctgctggatcagattgccaagatcctgaccatctaccagagcagcgaggacatccaggaagaactgaccaatctgaactccgagctgacccaggaagagatcgagcagatctctaatctgaagggctataccggcacccacaacctgagcctgaaggccatcaacctgatcctggacgagctgtggcacaccaacgacaaccagatcgctatcttcaaccggctgaagctggtgcccaagaaggtggacctgtcccagcagaaagagatccccaccaccctggtggacgacttcatcctgagccccgtcgtgaagagaagcttcatccagagcatcaaagtgatcaacgccatcatcaagaagtacggcctgcccaacgacatcattatcgagctggcccgcgagaagaactccaaggacgcccagaaaatgatcaacgagatgcagaagcggaaccggcagaccaacgagcggatcgaggaaatcatccggaccaccggcaaagagaacgccaagtacctgatcgagaagatcaagctgcacgacatgcaggaaggcaagtgcctgtacagcctggaagccatccctctggaagatctgctgaacaaccccttcaactatgaggtggaccacatcatccccagaagcgtgtccttcgacaacagcttcaacaacaaggtgctcgtgaagcaggaagaagccagcaagaagggcaaccggaccccattccagtacctgagcagcagcgacagcaagatcagctacgaaaccttcaagaagcacatcctgaatctggccaagggcaagggcagaatcagcaagaccaagaaagagtatctgctggaagaacgggacatcaacaggttctccgtgcagaaagacttcatcaaccggaacctggtggataccagatacgccaccagaggcctgatgaacctgctgcggagctacttcagagtgaacaacctggacgtgaaagtgaagtccatcaatggcggcttcaccagctttctgcggcggaagtggaagtttaagaaagagcggaacaaggggtacaagcaccacgccgaggacgccctgatcattgccaacgccgatttcatcttcaaagagtggaagaaactggacaaggccaaaaaagtgatggaaaaccagatgttcgaggaaaagcaggccgagagcatgcccgagatcgaaaccgagcaggagtacaaagagatcttcatcaccccccaccagatcaagcacattaaggacttcaaggactacaagtacagccaccgggtggacaagaagcctaatagagagctgattaacgacaccctgtactccacccggaaggacgacaagggcaacaccctgatcgtgaacaatctgaacggcctgtacgacaaggacaatgacaagctgaaaaagctgatcaacaagagccccgaaaagctgctgatgtaccaccacgacccccagacctaccagaaactgaagctgattatggaacagtacggcgacgagaagaatcccctgtacaagtactacgaggaaaccgggaactacctgaccaagtactccaaaaaggacaacggccccgtgatcaagaagattaagtattacggcaacaaactgaacgcccatctggacatcaccgacgactaccccaacagcagaaacaaggtcgtgaagctgtccctgaagccctacagattcgacgtgtacctggacaatggcgtgtacaagttcgtgaccgtgaagaatctggatgtgatcaaaaaagaaaactactacgaagtgaatagcaagtgctatgaggaagctaagaagctgaagaagatcagcaaccaggccgagtttatcgcctccttctacaacaacgatctgatcaagatcaacggcgagctgtatagagtgatcggcgtgaacaacgacctgctgaaccggatcgaagtgaacatgatcgacatcacctaccgcgagtacctggaaaacatgaacgacaagaggccccccaggatcattaagacaatcgcctccaagacccagagcattaagaagtacagcacagacattctgggcaacctgtatgaagtgaaatctaagaagcaccctcagatcatcaaaaagggcaaaaggccggcggccacgaaaaaggccggccaggcaaaaaagaaaaagggatccggacgggctgacgcattggacgattttgatctggatatgctgggaagtgacgccctcgatgattttgaccttgacatgcttggttcggatgcccttgatgactttgacctcgacatgctcggcagtgacgcccttgatgatttcgacctggacatgctgattaactgtacaggcagtggagagggcagaggaagtctgctaacatgcggtgacgtcgaggagaatcctggcccaatggccaagcctttgtctcaagaagaatccaccctcattgaaagagcaacggctacaatcaacagcatccccatctctgaagactacagcgtcgccagcgcagctctctctagcgacggccgcatcttcactggtgtcaatgtatatcattttactgggggaccttgtgcagaactcgtggtgctgggcactgctgctgctgcggcagctggcaacctgacttgtatcgtcgcgatcggaaatgagaacaggggcatcttgagcccctgcggacggtgccgacaggtgcttctcgatctgcatcctgggatcaaagccatagtgaaggacagtgatggacagccgacggcagttgggattcgtgaattgctgccctctggttatgtgtgggagggctaagaattcctagagctcgctgatcagcctcgactgtgccttctagttgccagccatctgttgtttgcccctcccccgtgccttccttgaccctggaaggtgccactcccactgtcctttcctaataaaatgaggaaattgcatcgcattgtctgagtaggtgtcattctattctggggggtggggtggggcaggacagcaagggggaggattgggaagagaatagcaggcatgctggggaggtaccgagggcctatttcccatgattccttcatatttgcatatacgatacaaggctgttagagagataattggaattaatttgactgtaaacacaaagatattagtacaaaatacgtgacgtagaaagtaataatttcttgggtagtttgcagttttaaaattatgttttaaaatggactatcatatgcttaccgtaacttgaaagtatttcgatttcttggctttatatatcttgtggaaaggacgaaacaccgaatctccagtgcaggagcacggttttagtactctggaaacagaatctactaaaacaaggcaaaatgccgtgtttatctcgtcaacttgttggcgagatttttgcggccgcaggaacccctagtgatggagttggccactccctctctgcgcgctcgctcgctcactgaggccgggcgaccaaaggtcgcccgacgcccgggctttgcccgggcggcctcagtgagcgagcgagcgcgcagctgcctgcaggggcgcctgatgcggtattttctccttacgcatctgtgcggtatttcacaccgcatacgtcaaagcaaccatagtacgcgccctgtagcggcgcattaagcgcggcgggtgtggtggttacgcgcagcgtgaccgctacacttgccagcgccttagcgcccgctcctttcgctttcttcccttcctttctcgccacgttcgccggctttccccgtcaagctctaaatcgggggctccctttagggttccgatttagtgctttacggcacctcgaccccaaaaaacttgatttgggtgatggttcacgtagtgggccatcgccctgatagacggtttttcgccctttgacgttggagtccacgttctttaatagtggactcttgttccaaactggaacaacactcaactctatctcgggctattcttttgatttataagggattttgccgatttcggtctattggttaaaaaatgagctgatttaacaaaaatttaacgcgaattttaacaaaatattaacgtttacaattttatggtgcactctcagtacaatctgctctgatgccgcatagttaagccagccccgacacccgccaacacccgctgacgcgccctgacgggcttgtctgctcccggcatccgcttacagacaagctgtgaccgtctccgggagctgcatgtgtcagaggttttcaccgtcatcaccgaaacgcgcgagacgaaagggcctcgtgatacgcctatttttataggttaatgtcatgataataatggtttcttagacgtcaggtggcacttttcggggaaatgtgcgcggaacccctatttgtttatttttctaaatacattcaaatatgtatccgctcatgagacaataaccctgataaatgcttcaataatattgaaaaaggaagagtatgagtattcaacatttccgtgtcgcccttattcccttttttgcggcattttgccttcctgtttttgctcacccagaaacgctggtgaaagtaaaagatgctgaagatcagttgggtgcacgagtgggttacatcgaactggatctcaacagcggtaagatccttgagagttttcgccccgaagaacgttttccaatgatgagcacttttaaagttctgctatgtggcgcggtattatcccgtattgacgccgggcaagagcaactcggtcgccgcatacactattctcagaatgacttggttgagtactcaccagtcacagaaaagcatcttacggatggcatgacagtaagagaattatgcagtgctgccataaccatgagtgataacactgcggccaacttacttctgacaacgatcggaggaccgaaggagctaaccgcttttttgcacaacatgggggatcatgtaactcgccttgatcgttgggaaccggagctgaatgaagccataccaaacgacgagcgtgacaccacgatgcctgtagcaatggcaacaacgttgcgcaaactattaactggcgaactacttactctagcttcccggcaacaattaatagactggatggaggcggataaagttgcaggaccacttctgcgctcggcccttccggctggctggtttattgctgataaatctggagccggtgagcgtggaagccgcggtatcattgcagcactggggccagatggtaagccctcccgtatcgtagttatctacacgacggggagtcaggcaactatggatgaacgaaatagacagatcgctgagataggtgcctcactgattaagcattggtaactgtcagaccaagtttactcatatatactttagattgatttaaaacttcatttttaatttaaaaggatctaggtgaagatcctttttgataatctcatgaccaaaatcccttaacgtgagttttcgttccactgagcgtcagaccccgtagaaaagatcaaaggatcttcttgagatcctttttttctgcgcgtaatctgctgcttgcaaacaaaaaaaccaccgctaccagcggtggtttgtttgccggatcaagagctaccaactctttttccgaaggtaactggcttcagcagagcgcagataccaaatactgttcttctagtgtagccgtagttaggccaccacttcaagaactctgtagcaccgcctacatacctcgctctgctaatcctgttaccagtggctgctgccagtggcgataagtcgtgtcttaccgggttggactcaagacgatagttaccggataaggcgcagcggtcgggctgaacggggggttcgtgcacacagcccagcttggagcgaacgacctacaccgaactgagatacctacagcgtgagctatgagaaagcgccacgcttcccgaagggagaaaggcggacaggtatccggtaagcggcagggtcggaacaggagagcgcacgagggagcttccagggggaaacgcctggtatctttatagtcctgtcgggtttcgccacctctgacttgagcgtcgatttttgtgatgctcgtcaggggggcggagcctatggaaaaacgccagcaacgcggcctttttacggttcctggccttttgctggccttttgctcacatgt

SEQ ID NO: 97 - RNA, 7997 nt, synthetic construct
  source 1..7997: mol_type = other RNA
cctgcaggcagctgcgcgctcgctcgctcactgaggccgcccgggcgtcgggcgacctttggtcgcccggcctcagtgagcgagcgagcgcgcagagagggagtggccaactccatcactaggggttcctgcggcctctagactcgaggcgttgacattgattattgactagttattaatagtaatcaattacggggtcattagttcatagcccatatatggagttccgcgttacataacttacggtaaatggcccgcctggctgaccgcccaacgacccccgcccattgacgtcaataatgacgtatgttcccatagtaacgccaatagggactttccattgacgtcaatgggtggagtatttacggtaaactgcccacttggcagtacatcaagtgtatcatatgccaagtacgccccctattgacgtcaatgacggtaaatggcccgcctggcattatgcccagtacatgaccttatgggactttcctacttggcagtacatctacgtattagtcatcgctattaccatggtgatgcggttttggcagtacatcaatgggcgtggatagcggtttgactcacggggatttccaagtctccaccccattgacgtcaatgggagtttgttttggcaccaaaatcaacgggactttccaaaatgtcgtaacaactccgccccattgacgcaaatgggcggtaggcgtgtacggtgggaggtctatataagcagagctctctggctaactaccggtgccaccatggccccaaagaagaagcggaaggtcggtatccacggagtcccagcagccaagcggaactacatcctgggcctggccatcggcatcaccagcgtgggctacggcatcatcgactacgagacacgggacgtgatcgatgccggcgtgcggctgttcaaagaggccaacgtggaaaacaacgagggcaggcggagcaagagaggcgccagaaggctgaagcggcggaggcggcatagaatccagagagtgaagaagctgctgttcgactacaacctgctgaccgaccacagcgagctgagcggcatcaacccctacgaggccagagtgaagggcctgagccagaagctgagcgaggaagagttctctgccgccctgctgcacctggccaagagaagaggcgtgcacaacgtgaacgaggtggaagaggacaccggcaacgagctgtccaccaaagagcagatcagccggaacagcaaggccctggaagagaaatacgtggccgaactgcagctggaacggctgaagaaagacggcgaagtgcggggcagcatcaacagattcaagaccagcgactacgtgaaagaagccaaacagctgctgaaggtgcagaaggcctaccaccagctggaccagagcttcatcgacacctacatcgacctgctggaaacccggcggacctactatgagggacctggcgagggcagccccttcggctggaaggacatcaaagaatggtacgagatgctgatgggccactgcacctacttccccgaggaactgcggagcgtgaagtacgcctacaacgccgacctgtacaacgccctgaacgacctgaacaatctcgtgatcaccagggacgagaacgagaagctggaatattacgagaagttccagatcatcgagaacgtgttcaagcagaagaagaagcccaccctgaagcagatcgccaaagaaatcctcgtgaacgaagaggatattaagggctacagagtgaccagcaccggcaagcccgagttcaccaacctgaaggtgtaccacgacatcaaggacattaccgcccggaaagagattattgagaacgccgagctgctggatcagattgccaagatcctgaccatctaccagagcagcgaggacatccaggaagaactgaccaatctgaactccgagctgacccaggaagagatcgagcagatctctaatctgaagggctataccggcacccacaacctgagcctgaaggccatcaacctgatcctggacgagctgtggcacaccaacgacaaccagatcgctatcttcaaccggctgaagctggtgcccaagaaggtggacctgtcccagcagaaagagatccccaccaccctggtggacgacttcatcctgagccccgtcgtgaagagaagcttcatccagagcatcaaagtgatcaacgccatcatcaagaagtacggcctgcccaacgacatcattatcgagctggcccgcgagaagaactccaaggacgcccagaaaatgatcaacgagatgcagaagcggaaccggcagaccaacgagcggatcgaggaaatcatccggaccaccggcaaagagaacgccaagtacctgatcgagaagatcaagctgcacgacatgcaggaaggcaagtgcctgtacagcctggaagccatccctctggaagatctgctgaacaaccccttcaactatgaggtggaccacatcatccccagaagcgtgtccttcgacaacagcttcaacaacaaggtgctcgtgaagcaggaagaagccagcaagaagggcaaccggaccccattccagtacctgagcagcagcgacagcaagatcagctacgaaaccttcaagaagcacatcctgaatctggccaagggcaagggcagaatcagcaagaccaagaaagagtatctgctggaagaacgggacatcaacaggttctccgtgcagaaagacttcatcaaccggaacctggtggataccagatacgccaccagaggcctgatgaacctgctgcggagctacttcagagtgaacaacctggacgtgaaagtgaagtccatcaatggcggcttcaccagctttctgcggcggaagtggaagtttaagaaagagcggaacaaggggtacaagcaccacgccgaggacgccctgatcattgccaacgccgatttcatcttcaaagagtggaagaaactggacaaggccaaaaaagtgatggaaaaccagatgttcgaggaaaagcaggccgagagcatgcccgagatcgaaaccgagcaggagtacaaagagatcttcatcaccccccaccagatcaagcacattaaggacttcaaggactacaagtacagccaccgggtggacaagaagcctaatagagagctgattaacgacaccctgtactccacccggaaggacgacaagggcaacaccctgatcgtgaacaatctgaacggcctgtacgacaaggacaatgacaagctgaaaaagctgatcaacaagagccccgaaaagctgctgatgtaccaccacgacccccagacctaccagaaactgaagctgattatggaacagtacggcgacgagaagaatcccctgtacaagtactacgaggaaaccgggaactacctgaccaagtactccaaaaaggacaacggccccgtgatcaagaagattaagtattacggcaacaaactgaacgcccatctggacatcaccgacgactaccccaacagcagaaacaaggtcgtgaagctgtccctgaagccctacagattcgacgtgtacctggacaatggcgtgtacaagttcgtgaccgtgaagaatctggatgtgatcaaaaaagaaaactactacgaagtgaatagcaagtgctatgaggaagctaagaagctgaagaagatcagcaaccaggccgagtttatcgcctccttctacaacaacgatctgatcaagatcaacggcgagctgtatagagtgatcggcgtgaacaacgacctgctgaaccggatcgaagtgaacatgatcgacatcacctaccgcgagtacctggaaaacatgaacgacaagaggccccccaggatcattaagacaatcgcctccaagacccagagcattaagaagtacagcacagacattctgggcaacctgtatgaagtgaaatctaagaagcaccctcagatcatcaaaaagggcaaaaggccggcggccacgaaaaaggccggccaggcaaaaaagaaaaagggatccggacgggctgacgcattggacgattttgatctggatatgctgggaagtgacgccctcgatgattttgaccttgacatgcttggttcggatgcccttgatgactttgacctcgacatgctcggcagtgacgcccttgatgatttcgacctggacatgctgattaactgtacaggcagtggagagggcagaggaagtctgctaacatgcggtgacgtcgaggagaatcctggcccaatggccaagcctttgtctcaagaagaatccaccctcattgaaagagcaacggctacaatcaacagcatccccatctctgaagactacagcgtcgccagcgcagctctctctagcgacggccgcatcttcactggtgtcaatgtatatcattttactgggggaccttgtgcagaactcgtggtgctgggcactgctgctgctgcggcagctggcaacctgacttgtatcgtcgcgatcggaaatgagaacaggggcatcttgagcccctgcggacggtgccgacaggtgcttctcgatctgcatcctgggatcaaagccatagtgaaggacagtgatggacagccgacggcagttgggattcgtgaattgctgccctctggttatgtgtgggagggctaagaattcctagagctcgctgatcagcctcgactgtgccttctagttgccagccatctgttgtttgcccctcccccgtgccttccttgaccctggaaggtgccactcccactgtcctttcctaataaaatgaggaaattgcatcgcattgtctgagtaggtgtcattctattctggggggtggggtggggcaggacagcaagggggaggattgggaagagaatagcaggcatgctggggaggtaccgagggcctatttcccatgattccttcatatttgcatatacgatacaaggctgttagagagataattggaattaatttgactgtaaacacaaagatattagtacaaaatacgtgacgtagaaagtaataatttcttgggtagtttgcagttttaaaattatgttttaaaatggactatcatatgcttaccgtaacttgaaagtatttcgatttcttggctttatatatcttgtggaaaggacgaaacaccgattggatattgggaagcaaatgttttagtactctggaaacagaatctactaaaacaaggcaaaatgccgtgtttatctcgtcaacttgttggcgagatttttgcggccgcaggaacccctagtgatggagttggccactccctctctgcgcgctcgctcgctcactgaggccgggcgaccaaaggtcgcccgacgcccgggctttgcccgggcggcctcagtgagcgagcgagcgcgcagctgcctgcaggggcgcctgatgcggtattttctccttacgcatctgtgcggtatttcacaccgcatacgtcaaagcaaccatagtacgcgccctgtagcggcgcattaagcgcggcgggtgtggtggttacgcgcagcgtgaccgctacacttgccagcgccttagcgcccgctcctttcgctttcttcccttcctttctcgccacgttcgccggctttccccgtcaagctctaaatcgggggctccctttagggttccgatttagtgctttacggcacctcgaccccaaaaaacttgatttgggtgatggttcacgtagtgggccatcgccctgatagacggtttttcgccctttgacgttggagtccacgttctttaatagtggactcttgttccaaactggaacaacactcaactctatctcgggctattcttttgatttataagggattttgccgatttcggtctattggttaaaaaatgagctgatttaacaaaaatttaacgcgaattttaacaaaatattaacgtttacaattttatggtgcactctcagtacaatctgctctgatgccgcatagttaagccagccccgacacccgccaacacccgctgacgcgccctgacgggcttgtctgctcccggcatccgcttacagacaagctgtgaccgtctccgggagctgcatgtgtcagaggttttcaccgtcatcaccgaaacgcgcgagacgaaagggcctcgtgatacgcctatttttataggttaatgtcatgataataatggtttcttagacgtcaggtggcacttttcggggaaatgtgcgcggaacccctatttgtttatttttctaaatacattcaaatatgtatccgctcatgagacaataaccctgataaatgcttcaataatattgaaaaaggaagagtatgagtattcaacatttccgtgtcgcccttattcccttttttgcggcattttgccttcctgtttttgctcacccagaaacgctggtgaaagtaaaagatgctgaagatcagttgggtgcacgagtgggttacatcgaactggatctcaacagcggtaagatccttgagagttttcgccccgaagaacgttttccaatgatgagcacttttaaagttctgctatgtggcgcggtattatcccgtattgacgccgggcaagagcaactcggtcgccgcatacactattctcagaatgacttggttgagtactcaccagtcacagaaaagcatcttacggatggcatgacagtaagagaattatgcagtgctgccataaccatgagtgataacactgcggccaacttacttctgacaacgatcggaggaccgaaggagctaaccgcttttttgcacaacatgggggatcatgtaactcgccttgatcgttgggaaccggagctgaatgaagccataccaaacgacgagcgtgacaccacgatgcctgtagcaatggcaacaacgttgcgcaaactattaactggcgaactacttactctagcttcccggcaacaattaatagactggatggaggcggataaagttgcaggaccacttctgcgctcggcccttccggctggctggtttattgctgataaatctggagccggtgagcgtggaagccgcggtatcattgcagcactggggccagatggtaagccctcccgtatcgtagttatctacacgacggggagtcaggcaactatggatgaacgaaatagacagatcgctgagataggtgcctcactgattaagcattggtaactgtcagaccaagtttactcatatatactttagattgatttaaaacttcatttttaatttaaaaggatctaggtgaagatcctttttgataatctcatgaccaaaatcccttaacgtgagttttcgttccactgagcgtcagaccccgtagaaaagatcaaaggatcttcttgagatcctttttttctgcgcgtaatctgctgcttgcaaacaaaaaaaccaccgctaccagcggtggtttgtttgccggatcaagagctaccaactctttttccgaaggtaactggcttcagcagagcgcagataccaaatactgttcttctagtgtagccgtagttaggccaccacttcaagaactctgtagcaccgcctacatacctcgctctgctaatcctgttaccagtggctgctgccagtggcgataagtcgtgtcttaccgggttggactcaagacgatagttaccggataaggcgcagcggtcgggctgaacggggggttcgtgcacacagcccagcttggagcgaacgacctacaccgaactgagatacctacagcgtgagctatgagaaagcgccacgcttcccgaagggagaaaggcggacaggtatccggtaagcggcagggtcggaacaggagagcgcacgagggagcttccagggggaaacgcctggtatctttatagtcctgtcgggtttcgccacctctgacttgagcgtcgatttttgtgatgctcgtcaggggggcggagcctatggaaaaacgccagcaacgcggcctttttacggttcctggccttttgctggccttttgctcacatgt

SEQ ID NO: 98 - RNA, 7997 nt, synthetic construct
  source 1..7997: mol_type = other RNA
cctgcaggcagctgcgcgctcgctcgctcactgaggccgcccgggcgtcgggcgacctttggtcgcccggcctcagtgagcgagcgagcgcgcagagagggagtggccaactccatcactaggggttcctgcggcctctagactcgaggcgttgacattgattattgactagttattaatagtaatcaattacggggtcattagttcatagcccatatatggagttccgcgttacataacttacggtaaatggcccgcctggctgaccgcccaacgacccccgcccattgacgtcaataatgacgtatgttcccatagtaacgccaatagggactttccattgacgtcaatgggtggagtatttacggtaaactgcccacttggcagtacatcaagtgtatcatatgccaagtacgccccctattgacgtcaatgacggtaaatggcccgcctggcattatgcccagtacatgaccttatgggactttcctacttggcagtacatctacgtattagtcatcgctattaccatggtgatgcggttttggcagtacatcaatgggcgtggatagcggtttgactcacggggatttccaagtctccaccccattgacgtcaatgggagtttgttttggcaccaaaatcaacgggactttccaaaatgtcgtaacaactccgccccattgacgcaaatgggcggtaggcgtgtacggtgggaggtctatataagcagagctctctggctaactaccggtgccaccatggccccaaagaagaagcggaaggtcggtatccacggagtcccagcagccaagcggaactacatcctgggcctggccatcggcatcaccagcgtgggctacggcatcatcgactacgagacacgggacgtgatcgatgccggcgtgcggctgttcaaagaggccaacgtggaaaacaacgagggcaggcggagcaagagaggcgccagaaggctgaagcggcggaggcggcatagaatccagagagtgaagaagctgctgttcgactacaacctgctgaccgaccacagcgagctgagcggcatcaacccctacgaggccagagtgaagggcctgagccagaagctgagcgaggaagagttctctgccgccctgctgcacctggccaagagaagaggcgtgcacaacgtgaacgaggtggaagaggacaccggcaacgagctgtccaccaaagagcagatcagccggaacagcaaggccctggaagagaaatacgtggccgaactgcagctggaacggctgaagaaagacggcgaagtgcggggcagcatcaacagattcaagaccagcgactacgtgaaagaagccaaacagctgctgaaggtgcagaaggcctaccaccagctggaccagagcttcatcgacacctacatcgacctgctggaaacccggcggacctactatgagggacctggcgagggcagccccttcggctggaaggacatcaaagaatggtacgagatgctgatgggccactgcacctacttccccgaggaactgcggagcgtgaagtacgcctacaacgccgacctgtacaacgccctgaacgacctgaacaatctcgtgatcaccagggacgagaacgagaagctggaatattacgagaagttccagatcatcgagaacgtgttcaagcagaagaagaagcccaccctgaagcagatcgccaaagaaatcctcgtgaacgaagaggatattaagggctacagagtgaccagcaccggcaagcccgagttcaccaacctgaaggtgtaccacgacatcaaggacattaccgcccggaaagagattattgagaacgccgagctgctggatcagattgccaagatcctgaccatctaccagagcagcgaggacatccaggaagaactgaccaatctgaactccgagctgacccaggaagagatcgagcagatctctaatctgaagggctataccggcacccacaacctgagcctgaaggccatcaacctgatcctggacgagctgtggcacaccaacgacaaccagatcgctatcttcaaccggctgaagctggtgcccaagaaggtggacctgtcccagcagaaagagatccccaccaccctggtggacgacttcatcctgagccccgtcgtgaagagaagcttcatccagagcatcaaagtgatcaacgccatcatcaagaagtacggcctgcccaacgacatcattatcgagctggcccgcgagaagaactccaaggacgcccagaaaatgatcaacgagatgcagaagcggaaccggcagaccaacgagcggatcgaggaaatcatccggaccaccggcaaagagaacgccaagtacctgatcgagaagatcaagctgcacgacatgcaggaaggcaagtgcctgtacagcctggaagccatccctctggaagatctgctgaacaaccccttcaactatgaggtggaccacatcatccccagaagcgtgtccttcgacaacagcttcaacaacaaggtgctcgtgaagcaggaagaagccagcaagaagggcaaccggaccccattccagtacctgagcagcagcgacagcaagatcagctacgaaaccttcaagaagcacatcctgaatctggccaagggcaagggcagaatcagcaagaccaagaaagagtatctgctggaagaacgggacatcaacaggttctccgtgcagaaagacttcatcaaccggaacctggtggataccagatacgccaccagaggcctgatgaacctgctgcggagctacttcagagtgaacaacctggacgtgaaagtgaagtccatcaatggcggcttcaccagctttctgcggcggaagtggaagtttaagaaagagcggaacaaggggtacaagcaccacgccgaggacgccctgatcattgccaacgccgatttcatcttcaaagagtggaagaaactggacaaggccaaaaaagtgatggaaaaccagatgttcgaggaaaagcaggccgagagcatgcccgagatcgaaaccgagcaggagtacaaagagatcttcatcaccccccaccagatcaagcacattaaggacttcaaggactacaagtacagccaccgggtggacaagaagcctaatagagagctgattaacgacaccctgtactccacccggaaggacgacaagggcaacaccctgatcgtgaacaatctgaacggcctgtacgacaaggacaatgacaagctgaaaaagctgatcaacaagagccccgaaaagctgctgatgtaccaccacgacccccagacctaccagaaactgaagctgattatggaacagtacggcgacgagaagaatcccctgtacaagtactacgaggaaaccgggaactacctgaccaagtactccaaaaaggacaacggccccgtgatcaagaagattaagtattacggcaacaaactgaacgcccatctggacatcaccgacgactaccccaacagcagaaacaaggtcgtgaagctgtccctgaagccctacagattcgacgtgtacctggacaatggcgtgtacaagttcgtgaccgtgaagaatctggatgtgatcaaaaaagaaaactactacgaagtgaatagcaagtgctatgaggaagctaagaagctgaagaagatcagcaaccaggccgagtttatcgcctccttctacaacaacgatctgatcaagatcaacggcgagctgtatagagtgatcggcgtgaacaacgacctgctgaaccggatcgaagtgaacatgatcgacatcacctaccgcgagtacctggaaaacatgaacgacaagaggccccccaggatcattaagacaatcgcctccaagacccagagcattaagaagtacagcacagacattctgggcaacctgtatgaagtgaaatctaagaagcaccctcagatcatcaaaaagggcaaaaggccggcggccacgaaaaaggccggccaggcaaaaaagaaaaagggatccggacgggctgacgcattggacgattttgatctggatatgctgggaagtgacgccctcgatgattttgaccttgacatgcttggttcggatgcccttgatgactttgacctcgacatgctcggcagtgacgcccttgatgatttcgacctggacatgctgattaactgtacaggcagtggagagggcagaggaagtctgctaacatgcggtgacgtcgaggagaatcctggcccaatggccaagcctttgtctcaagaagaatccaccctcattgaaagagcaacggctacaatcaacagcatccccatctctgaagactacagcgtcgccagcgcagctctctctagcgacggccgcatcttcactggtgtcaatgtatatcattttactgggggaccttgtgcagaactcgtggtgctgggcactgctgctgctgcggcagctggcaacctgacttgtatcgtcgcgatcggaaatgagaacaggggcatcttgagcccctgcggacggtgccgacaggtgcttctcgatctgcatcctgggatcaaagccatagtgaaggacagtgatggacagccgacggcagttgggattcgtgaattgctgccctctggttatgtgtgggagggctaagaattcctagagctcgctgatcagcctcgactgtgccttctagttgccagccatctgttgtttgcccctcccccgtgccttccttgaccctggaaggtgccactcccactgtcctttcctaataaaatgaggaaattgcatcgcattgtctgagtaggtgtcattctattctggggggtggggtggggcaggacagcaagggggaggattgggaagagaatagcaggcatgctggggaggtaccgagggcctatttcccatgattccttcatatttgcatatacgatacaaggctgttagagagataattggaattaatttgactgtaaacacaaagatattagtacaaaatacgtgacgtagaaagtaataatttcttgggtagtttgcagttttaaaattatgttttaaaatggactatcatatgcttaccgtaacttgaaagtatttcgatttcttggctttatatatcttgtggaaaggacgaaacaccgtgtatagctgcagattggatagttttagtactctggaaacagaatctactaaaacaaggcaaaatgccgtgtttatctcgtcaacttgttggcgagatttttgcggccgcaggaacccctagtgatggagttggccactccctctctgcgcgctcgctcgctcactgaggccgggcgaccaaaggtcgcccgacgcccgggctttgcccgggcggcctcagtgagcgagcgagcgcgcagctgcctgcaggggcgcctgatgcggtattttctccttacgcatctgtgcggtatttcacaccgcatacgtcaaagcaaccatagtacgcgccctgtagcggcgcattaagcgcggcgggtgtggtggttacgcgcagcgtgaccgctacacttgccagcgccttagcgcccgctcctttcgctttcttcccttcctttctcgccacgttcgccggctttccccgtcaagctctaaatcgggggctccctttagggttccgatttagtgctttacggcacctcgaccccaaaaaacttgatttgggtgatggttcacgtagtgggccatcgccctgatagacggtttttcgccctttgacgttggagtccacgttctttaatagtggactcttgttccaaactggaacaacactcaactctatctcgggctattcttttgatttataagggattttgccgatttcggtctattggttaaaaaatgagctgatttaacaaaaatttaacgcgaattttaacaaaatattaacgtttacaattttatggtgcactctcagtacaatctgctctgatgccgcatagttaagccagccccgacacccgccaacacccgctgacgcgccctgacgggcttgtctgctcccggcatccgcttacagacaagctgtgaccgtctccgggagctgcatgtgtcagaggttttcaccgtcatcaccgaaacgcgcgagacgaaagggcctcgtgatacgcctatttttataggttaatgtcatgataataatggtttcttagacgtcaggtggcacttttcggggaaatgtgcgcggaacccctatttgtttatttttctaaatacattcaaatatgtatccgctcatgagacaataaccctgataaatgcttcaataatattgaaaaaggaagagtatgagtattcaacatttccgtgtcgcccttattcccttttttgcggcattttgccttcctgtttttgctcacccagaaacgctggtgaaagtaaaagatgctgaagatcagttgggtgcacgagtgggttacatcgaactggatctcaacagcggtaagatccttgagagttttcgccccgaagaacgttttccaatgatgagcacttttaaagttctgctatgtggcgcggtattatcccgtattgacgccgggcaagagcaactcggtcgccgcatacactattctcagaatgacttggttgagtactcaccagtcacagaaaagcatcttacggatggcatgacagtaagagaattatgcagtgctgccataaccatgagtgataacactgcggccaacttacttctgacaacgatcggaggaccgaaggagctaaccgcttttttgcacaacatgggggatcatgtaactcgccttgatcgttgggaaccggagctgaatgaagccataccaaacgacgagcgtgacaccacgatgcctgtagcaatggcaacaacgttgcgcaaactattaactggcgaactacttactctagcttcccggcaacaattaatagactggatggaggcggataaagttgcaggaccacttctgcgctcggcccttccggctggctggtttattgctgataaatctggagccggtgagcgtggaagccgcggtatcattgcagcactggggccagatggtaagccctcccgtatcgtagttatctacacgacggggagtcaggcaactatggatgaacgaaatagacagatcgctgagataggtgcctcactgattaagcattggtaactgtcagaccaagtttactcatatatactttagattgatttaaaacttcatttttaatttaaaaggatctaggtgaagatcctttttgataatctcatgaccaaaatcccttaacgtgagttttcgttccactgagcgtcagaccccgtagaaaagatcaaaggatcttcttgagatcctttttttctgcgcgtaatctgctgcttgcaaacaaaaaaaccaccgctaccagcggtggtttgtttgccggatcaagagctaccaactctttttccgaaggtaactggcttcagcagagcgcagataccaaatactgttcttctagtgtagccgtagttaggccaccacttcaagaactctgtagcaccgcctacatacctcgctctgctaatcctgttaccagtggctgctgccagtggcgataagtcgtgtcttaccgggttggactcaagacgatagttaccggataaggcgcagcggtcgggctgaacggggggttcgtgcacacagcccagcttggagcgaacgacctacaccgaactgagatacctacagcgtgagctatgagaaagcgccacgcttcccgaagggagaaaggcggacaggtatccggtaagcggcagggtcggaacaggagagcgcacgagggagcttccagggggaaacgcctggtatctttatagtcctgtcgggtttcgccacctctgacttgagcgtcgatttttgtgatgctcgtcaggggggcggagcctatggaaaaacgccagcaacgcggcctttttacggttcctggccttttgctggccttttgctcacatgt

SEQ ID NO: 99 - RNA, 21 nt, synthetic construct
  source 1..21: mol_type = other RNA
gggagtagcgatcgcaggagc

SEQ ID NO: 100 - RNA, 21 nt, synthetic construct
  source 1..21: mol_type = other RNA
agggagtagcgatcgcaggag

SEQ ID NO: 101 - RNA, 21 nt, synthetic construct
  source 1..21: mol_type = other RNA
tagcgatcgcaggagccgggg

SEQ ID NO: 102 - RNA, 7996 nt, synthetic construct
  source 1..7996: mol_type = other RNA
cctgcaggcagctgcgcgctcgctcgctcactgaggccgcccgggcgtcgggcgacctttggtcgcccggcctcagtgagcgagcgagcgcgcagagagggagtggccaactccatcactaggggttcctgcggcctctagactcgaggcgttgacattgattattgactagttattaatagtaatcaattacggggtcattagttcatagcccatatatggagttccgcgttacataacttacggtaaatggcccgcctggctgaccgcccaacgacccccgcccattgacgtcaataatgacgtatgttcccatagtaacgccaatagggactttccattgacgtcaatgggtggagtatttacggtaaactgcccacttggcagtacatcaagtgtatcatatgccaagtacgccccctattgacgtcaatgacggtaaatggcccgcctggcattatgcccagtacatgaccttatgggactttcctacttggcagtacatctacgtattagtcatcgctattaccatggtgatgcggttttggcagtacatcaatgggcgtggatagcggtttgactcacggggatttccaagtctccaccccattgacgtcaatgggagtttgttttggcaccaaaatcaacgggactttccaaaatgtcgtaacaactccgccccattgacgcaaatgggcggtaggcgtgtacggtgggaggtctatataagcagagctctctggctaactaccggtgccaccatggccccaaagaagaagcggaaggtcggtatccacggagtcccagcagccaagcggaactacatcctgggcctggccatcggcatcaccagcgtgggctacggcatcatcgactacgagacacgggacgtgatcgatgccggcgtgcggctgttcaaagaggccaacgtggaaaacaacgagggcaggcggagcaagagaggcgccagaaggctgaagcggcggaggcggcatagaatccagagagtgaagaagctgctgttcgactacaacctgctgaccgaccacagcgagctgagcggcatcaacccctacgaggccagagtgaagggcctgagccagaagctgagcgaggaagagttctctgccgccctgctgcacctggccaagagaagaggcgtgcacaacgtgaacgaggtggaagaggacaccggcaacgagctgtccaccaaagagcagatcagccggaacagcaaggccctggaagagaaatacgtggccgaactgcagctggaacggctgaagaaagacggcgaagtgcggggcagcatcaacagattcaagaccagcgactacgtgaaagaagccaaacagctgctgaaggtgcagaaggcctaccaccagctggaccagagcttcatcgacacctacatcgacctgctggaaacccggcggacctactatgagggacctggcgagggcagccccttcggctggaaggacatcaaagaatggtacgagatgctgatgggccactgcacctacttccccgaggaactgcggagcgtgaagtacgcctacaacgccgacctgtacaacgccctgaacgacctgaacaatctcgtgatcaccagggacgagaacgagaagctggaatattacgagaagttccagatcatcgagaacgtgttcaagcagaagaagaagcccaccctgaagcagatcgccaaagaaatcctcgtgaacgaagaggatattaagggctacagagtgaccagcaccggcaagcccgagttcaccaacctgaaggtgtaccacgacatcaaggacattaccgcccggaaagagattattgagaacgccgagctgctggatcagattgccaagatcctgaccatctaccagagcagcgaggacatccaggaagaactgaccaatctgaactccgagctgacccaggaagagatcgagcagatctctaatctgaagggctataccggcacccacaacctgagcctgaaggccatcaacctgatcctggacgagctgtggcacaccaacgacaaccagatcgctatcttcaaccggctgaagctggtgcccaagaaggtggacctgtcccagcagaaagagatccccaccaccctggtggacgacttcatcctgagccccgtcgtgaagagaagcttcatccagagcatcaaagtgatcaacgccatcatcaagaagtacggcctgcccaacgacatcattatcgagctggcccgcgagaagaactccaaggacgcccagaaaatgatcaacgagatgcagaagcggaaccggcagaccaacgagcggatcgaggaaatcatccggaccaccggcaaagagaacgccaagtacctgatcgagaagatcaagctgcacgacatgcaggaaggcaagtgcctgtacagcctggaagccatccctctggaagatctgctgaacaaccccttcaactatgaggtggaccacatcatccccagaagcgtgtccttcgacaacagcttcaacaacaaggtgctcgtgaagcaggaagaagccagcaagaagggcaaccggaccccattccagtacctgagcagcagcgacagcaagatcagctacgaaaccttcaagaagcacatcctgaatctggccaagggcaagggcagaatcagcaagaccaagaaagagtatctgctggaagaacgggacatcaacaggttctccgtgcagaaagacttcatcaaccggaacctggtggataccagatacgccaccagaggcctgatgaacctgctgcggagctacttcagagtgaacaacctggacgtgaaagtgaagtccatcaatggcggcttcaccagctttctgcggcggaagtggaagtttaagaaagagcggaacaaggggtacaagcaccacgccgaggacgccctgatcattgccaacgccgatttcatcttcaaagagtggaagaaactggacaaggccaaaaaagtgatggaaaaccagatgttcgaggaaaagcaggccgagagcatgcccgagatcgaaaccgagcaggagtacaaagagatcttcatcaccccccaccagatcaagcacattaaggacttcaaggactacaagtacagccaccgggtggacaagaagcctaatagagagctgattaacgacaccctgtactccacccggaaggacgacaagggcaacaccctgatcgtgaacaatctgaacggcctgtacgacaaggacaatgacaagctgaaaaagctgatcaacaagagccccgaaaagctgctgatgtaccaccacgacccccagacctaccagaaactgaagctgattatggaacagtacggcgacgagaagaatcccctgtacaagtactacgaggaaaccgggaactacctgaccaagtactccaaaaaggacaacggccccgtgatcaagaagattaagtattacggcaacaaactgaacgcccatctggacatcaccgacgactaccccaacagcagaaacaaggtcgtgaagctgtccctgaagccctacagattcgacgtgtacctggacaatggcgtgtacaagttcgtgaccgtgaagaatctggatgtgatcaaaaaagaaaactactacgaagtgaatagcaagtgctatgaggaagctaagaagctgaagaagatcagcaaccaggccgagtttatcgcctccttctacaacaacgatctgatcaagatcaacggcgagctgtatagagtgatcggcgtgaacaacgacctgctgaaccggatcgaagtgaacatgatcgacatcacctaccgcgagtacctggaaaacatgaacgacaagaggccccccaggatcattaagacaatcgcctccaagacccagagcattaagaagtacagcacagacattctgggcaacctgtatgaagtgaaatctaagaagcaccctcagatcatcaaaaagggcaaaaggccggcggccacgaaaaaggccggccaggcaaaaaagaaaaagggatccggacgggctgacgcattggacgattttgatctggatatgctgggaagtgacgccctcgatgattttgaccttgacatgcttggttcggatgcccttgatgactttgacctcgacatgctcggcagtgacgcccttgatgatttcgacctggacatgctgattaactgtacaggcagtggagagggcagaggaagtctgctaacatgcggtgacgtcgaggagaatcctggcccaatggccaagcctttgtctcaagaagaatccaccctcattgaaagagcaacggctacaatcaacagcatccccatctctgaagactacagcgtcgccagcgcagctctctctagcgacggccgcatcttcactggtgtcaatgtatatcattttactgggggaccttgtgcagaactcgtggtgctgggcactgctgctgctgcggcagctggcaacctgacttgtatcgtcgcgatcggaaatgagaacaggggcatcttgagcccctgcggacggtgccgacaggtgcttctcgatctgcatcctgggatcaaagccatagtgaaggacagtgatggacagccgacggcagttgggattcgtgaattgctgccctctggttatgtgtgggagggctaagaattcctagagctcgctgatcagcctcgactgtgccttctagttgccagccatctgttgtttgcccctcccccgtgccttccttgaccctggaaggtgccactcccactgtcctttcctaataaaatgaggaaattgcatcgcattgtctgagtaggtgtcattctattctggggggtggggtggggcaggacagcaagggggaggattgggaagagaatagcaggcatgctggggaggtaccgagggcctatttcccatgattccttcatatttgcatatacgatacaaggctgttagagagataattggaattaatttgactgtaaacacaaagatattagtacaaaatacgtgacgtagaaagtaataatttcttgggtagtttgcagttttaaaattatgttttaaaatggactatcatatgcttaccgtaacttgaaagtatttcgatttcttggctttatatatcttgtggaaaggacgaaacaccgggagtagcgatcgcaggagcgttttagtactctggaaacagaatctactaaaacaaggcaaaatgccgtgtttatctcgtcaacttgttggcgagatttttgcggccgcaggaacccctagtgatggagttggccactccctctctgcgcgctcgctcgctcactgaggccgggcgaccaaaggtcgcccgacgcccgggctttgcccgggcggcctcagtgagcgagcgagcgcgcagctgcctgcaggggcgcctgatgcggtattttctccttacgcatctgtgcggtatttcacaccgcatacgtcaaagcaaccatagtacgcgccctgtagcggcgcattaagcgcggcgggtgtggtggttacgcgcagcgtgaccgctacacttgccagcgccttagcgcccgctcctttcgctttcttcccttcctttctcgccacgttcgccggctttccccgtcaagctctaaatcgggggctccctttagggttccgatttagtgctttacggcacctcgaccccaaaaaacttgatttgggtgatggttcacgtagtgggccatcgccctgatagacggtttttcgccctttgacgttggagtccacgttctttaatagtggactcttgttccaaactggaacaacactcaactctatctcgggctattcttttgatttataagggattttgccgatttcggtctattggttaaaaaatgagctgatttaacaaaaatttaacgcgaattttaacaaaatattaacgtttacaattttatggtgcactctcagtacaatctgctctgatgccgcatagttaagccagccccgacacccgccaacacccgctgacgcgccctgacgggcttgtctgctcccggcatccgcttacagacaagctgtgaccgtctccgggagctgcatgtgtcagaggttttcaccgtcatcaccgaaacgcgcgagacgaaagggcctcgtgatacgcctatttttataggttaatgtcatgataataatggtttcttagacgtcaggtggcacttttcggggaaatgtgcgcggaacccctatttgtttatttttctaaatacattcaaatatgtatccgctcatgagacaataaccctgataaatgcttcaataatattgaaaaaggaagagtatgagtattcaacatttccgtgtcgcccttattcccttttttgcggcattttgccttcctgtttttgctcacccagaaacgctggtgaaagtaaaagatgctgaagatcagttgggtgcacgagtgggttacatcgaactggatctcaacagcggtaagatccttgagagttttcgccccgaagaacgttttccaatgatgagcacttttaaagttctgctatgtggcgcggtattatcccgtattgacgccgggcaagagcaactcggtcgccgcatacactattctcagaatgacttggttgagtactcaccagtcacagaaaagcatcttacggatggcatgacagtaagagaattatgcagtgctgccataaccatgagtgataacactgcggccaacttacttctgacaacgatcggaggaccgaaggagctaaccgcttttttgcacaacatgggggatcatgtaactcgccttgatcgttgggaaccggagctgaatgaagccataccaaacgacgagcgtgacaccacgatgcctgtagcaatggcaacaacgttgcgcaaactattaactggcgaactacttactctagcttcccggcaacaattaatagactggatggaggcggataaagttgcaggaccacttctgcgctcggcccttccggctggctggtttattgctgataaatctggagccggtgagcgtggaagccgcggtatcattgcagcactggggccagatggtaagccctcccgtatcgtagttatctacacgacggggagtcaggcaactatggatgaacgaaatagacagatcgctgagataggtgcctcactgattaagcattggtaactgtcagaccaagtttactcatatatactttagattgatttaaaacttcatttttaatttaaaaggatctaggtgaagatcctttttgataatctcatgaccaaaatcccttaacgtgagttttcgttccactgagcgtcagaccccgtagaaaagatcaaaggatcttcttgagatcctttttttctgcgcgtaatctgctgcttgcaaacaaaaaaaccaccgctaccagcggtggtttgtttgccggatcaagagctaccaactctttttccgaaggtaactggcttcagcagagcgcagataccaaatactgttcttctagtgtagccgtagttaggccaccacttcaagaactctgtagcaccgcctacatacctcgctctgctaatcctgttaccagtggctgctgccagtggcgataagtcgtgtcttaccgggttggactcaagacgatagttaccggataaggcgcagcggtcgggctgaacggggggttcgtgcacacagcccagcttggagcgaacgacctacaccgaactgagatacctacagcgtgagctatgagaaagcgccacgcttcccgaagggagaaaggcggacaggtatccggtaagcggcagggtcggaacaggagagcgcacgagggagcttccagggggaaacgcctggtatctttatagtcctgtcgggtttcgccacctctgacttgagcgtcgatttttgtgatgctcgtcaggggggcggagcctatggaaaaacgccagcaacgcggcctttttacggttcctggccttttgctggccttttgctcacatgt

SEQ ID NO: 103 - RNA, 7997 nt, synthetic construct
  source 1..7997: mol_type = other RNA
cctgcaggcagctgcgcgctcgctcgctcactgaggccgcccgggcgtcgggcgacctttggtcgcccggcctcagtgagcgagcgagcgcgcagagagggagtggccaactccatcactaggggttcctgcggcctctagactcgaggcgttgacattgattattgactagttattaatagtaatcaattacggggtcattagttcatagcccatatatggagttccgcgttacataacttacggtaaatggcccgcctggctgaccgcccaacgacccccgcccattgacgtcaataatgacgtatgttcccatagtaacgccaatagggactttccattgacgtcaatgggtggagtatttacggtaaactgcccacttggcagtacatcaagtgtatcatatgccaagtacgccccctattgacgtcaatgacggtaaatggcccgcctggcattatgcccagtacatgaccttatgggactttcctacttggcagtacatctacgtattagtcatcgctattaccatggtgatgcggttttggcagtacatcaatgggcgtggatagcggtttgactcacggggatttccaagtctccaccccattgacgtcaatgggagtttgttttggcaccaaaatcaacgggactttccaaaatgtcgtaacaactccgccccattgacgcaaatgggcggtaggcgtgtacggtgggaggtctatataagcagagctctctggctaactaccggtgccaccatggccccaaagaagaagcggaaggtcggtatccacggagtcccagcagccaagcggaactacatcctgggcctggccatcggcatcaccagcgtgggctacggcatcatcgactacgagacacgggacgtgatcgatgccggcgtgcggctgttcaaagaggccaacgtggaaaacaacgagggcaggcggagcaagagaggcgccagaaggctgaagcggcggaggcggcatagaatccagagagtgaagaagctgctgttcgactacaacctgctgaccgaccacagcgagctgagcggcatcaacccctacgaggccagagtgaagggcctgagccagaagctgagcgaggaagagttctctgccgccctgctgcacctggccaagagaagaggcgtgcacaacgtgaacgaggtggaagaggacaccggcaacgagctgtccaccaaagagcagatcagccggaacagcaaggccctggaagagaaatacgtggccgaactgcagctggaacggctgaagaaagacggcgaagtgcggggcagcatcaacagattcaagaccagcgactacgtgaaagaagccaaacagctgctgaaggtgcagaaggcctaccaccagctggaccagagcttcatcgacacctacatcgacctgctggaaacccggcggacctactatgagggacctggcgagggcagccccttcggctggaaggacatcaaagaatggtacgagatgctgatgggccactgcacctacttccccgaggaactgcggagcgtgaagtacgcctacaacgccgacctgtacaacgccctgaacgacctgaacaatctcgtgatcaccagggacgagaacgagaagctggaatattacgagaagttccagatcatcgagaacgtgttcaagcagaagaagaagcccaccctgaagcagatcgccaaagaaatcctcgtgaacgaagaggatattaagggctacagagtgaccagcaccggcaagcccgagttcaccaacctgaaggtgtaccacgacatcaaggacattaccgcccggaaagagattattgagaacgccgagctgctggatcagattgccaagatcctgaccatctaccagagcagcgaggacatccaggaagaactgaccaatctgaactccgagctgacccaggaagagatcgagcagatctctaatctgaagggctataccggcacccacaacctgagcctgaaggccatcaacctgatcctggacgagctgtggcacaccaacgacaaccagatcgctatcttcaaccggctgaagctggtgcccaagaaggtggacctgtcccagcagaaagagatccccaccaccctggtggacgacttcatcctgagccccgtcgtgaagagaagcttcatccagagcatcaaagtgatcaacgccatcatcaagaagtacggcctgcccaacgacatcattatcgagctggcccgcgagaagaactccaaggacgcccagaaaatgatcaacgagatgcagaagcggaaccggcagaccaacgagcggatcgaggaaatcatccggaccaccggcaaagagaacgccaagtacctgatcgagaagatcaagctgcacgacatgcaggaaggcaagtgcctgtacagcctggaagccatccctctggaagatctgctgaacaaccccttcaactatgaggtggaccacatcatccccagaagcgtgtccttcgacaacagcttcaacaacaaggtgctcgtgaagcaggaagaagccagcaagaagggcaaccggaccccattccagtacctgagcagcagcgacagcaagatcagctacgaaaccttcaagaagcacatcctgaatctggccaagggcaagggcagaatcagcaagaccaagaaagagtatctgctggaagaacgggacatcaacaggttctccgtgcagaaagacttcatcaaccggaacctggtggataccagatacgccaccagaggcctgatgaacctgctgcggagctacttcagagtgaacaacctggacgtgaaagtgaagtccatcaatggcggcttcaccagctttctgcggcggaagtggaagtttaagaaagagcggaacaaggggtacaagcaccacgccgaggacgccctgatcattgccaacgccgatttcatcttcaaagagtggaagaaactggacaaggccaaaaaagtgatggaaaaccagatgttcgaggaaaagcaggccgagagcatgcccgagatcgaaaccgagcaggagtacaaagagatcttcatcaccccccaccagatcaagcacattaaggacttcaaggactacaagtacagccaccgggtggacaagaagcctaatagagagctgattaacgacaccctgtactccacccggaaggacgacaagggcaacaccctgatcgtgaacaatctgaacggcctgtacgacaaggacaatgacaagctgaaaaagctgatcaacaagagccccgaaaagctgctgatgtaccaccacgacccccagacctaccagaaactgaagctgattatggaacagtacggcgacgagaagaatcccctgtacaagtactacgaggaaaccgggaactacctgaccaagtactccaaaaaggacaacggccccgtgatcaagaagattaagtattacggcaacaaactgaacgcccatctggacatcaccgacgactaccccaacagcagaaacaaggtcgtgaagctgtccctgaagccctacagattcgacgtgtacctggacaatggcgtgtacaagttcgtgaccgtgaagaatctggatgtgatcaaaaaagaaaactactacgaagtgaatagcaagtgctatgaggaagctaagaagctgaagaagatcagcaaccaggccgagtttatcgcctccttctacaacaacgatctgatcaagatcaacggcgagctgtatagagtgatcggcgtgaacaacgacctgctgaaccggatcgaagtgaacatgatcgacatcacctaccgcgagtacctggaaaacatgaacgacaagaggccccccaggatcattaagacaatcgcctccaagacccagagcattaagaagtacagcacagacattctgggcaacctgtatgaagtgaaatctaagaagcaccctcagatcatcaaaaagggcaaaaggccggcggccacgaaaaaggccggccaggcaaaaaagaaaaagggatccggacgggctgacgcattggacgattttgatctggatatgctgggaagtgacgccctcgatgattttgaccttgacatgcttggttcggatgcccttgatgactttgacctcgacatgctcggcagtgacgcccttgatgatttcgacctggacatgctgattaactgtacaggcagtggagagggcagaggaagtctgctaacatgcggtgacgtcgaggagaatcctggcccaatggccaagcctttgtctcaagaagaatccaccctcattgaaagagcaacggctacaatcaacagcatccccatctctgaagactacagcgtcgccagcgcagctctctctagcgacggccgcatcttcactggtgtcaatgtatatcattttactgggggaccttgtgcagaactcgtggtgctgggcactgctgctgctgcggcagctggcaacctgacttgtatcgtcgcgatcggaaatgagaacaggggcatcttgagcccctgcggacggtgccgacaggtgcttctcgatctgcatcctgggatcaaagccatagtgaaggacagtgatggacagccgacggcagttgggattcgtgaattgctgccctctggttatgtgtgggagggctaagaattcctagagctcgctgatcagcctcgactgtgccttctagttgccagccatctgttgtttgcccctcccccgtgccttccttgaccctggaaggtgccactcccactgtcctttcctaataaaatgaggaaattgcatcgcattgtctgagtaggtgtcattctattctggggggtggggtggggcaggacagcaagggggaggattgggaagagaatagcaggcatgctggggaggtaccgagggcctatttcccatgattccttcatatttgcatatacgatacaaggctgttagagagataattggaattaatttgactgtaaacacaaagatattagtacaaaatacgtgacgtagaaagtaataatttcttgggtagtttgcagttttaaaattatgttttaaaatggactatcatatgcttaccgtaacttgaaagtatttcgatttcttggctttatatatcttgtggaaaggacgaaacaccgagggagtagcgatcgcaggaggttttagtactctggaaacagaatctactaaaacaaggcaaaatgccgtgtttatctcgtcaacttgttggcgagatttttgcggccgcaggaacccctagtgatggagttggccactccctctctgcgcgctcgctcgctcactgaggccgggcgaccaaaggtcgcccgacgcccgggctttgcccgggcggcctcagtgagcgagcgagcgcgcagctgcctgcaggggcgcctgatgcggtattttctccttacgcatctgtgcggtatttcacaccgcatacgtcaaagcaaccatagtacgcgccctgtagcggcgcattaagcgcggcgggtgtggtggttacgcgcagcgtgaccgctacacttgccagcgccttagcgcccgctcctttcgctttcttcccttcctttctcgccacgttcgccggctttccccgtcaagctctaaatcgggggctccctttagggttccgatttagtgctttacggcacctcgaccccaaaaaacttgatttgggtgatggttcacgtagtgggccatcgccctgatagacggtttttcgccctttgacgttggagtccacgttctttaatagtggactcttgttccaaactggaacaacactcaactctatctcgggctattcttttgatttataagggattttgccgatttcggtctattggttaaaaaatgagctgatttaacaaaaatttaacgcgaattttaacaaaatattaacgtttacaattttatggtgcactctcagtacaatctgctctgatgccgcatagttaagccagccccgacacccgccaacacccgctgacgcgccctgacgggcttgtctgctcccggcatccgcttacagacaagctgtgaccgtctccgggagctgcatgtgtcagaggttttcaccgtcatcaccgaaacgcgcgagacgaaagggcctcgtgatacgcctatttttataggttaatgtcatgataataatggtttcttagacgtcaggtggcacttttcggggaaatgtgcgcggaacccctatttgtttatttttctaaatacattcaaatatgtatccgctcatgagacaataaccctgataaatgcttcaataatattgaaaaaggaagagtatgagtattcaacatttccgtgtcgcccttattcccttttttgcggcattttgccttcctgtttttgctcacccagaaacgctggtgaaagtaaaagatgctgaagatcagttgggtgcacgagtgggttacatcgaactggatctcaacagcggtaagatccttgagagttttcgccccgaagaacgttttccaatgatgagcacttttaaagttctgctatgtggcgcggtattatcccgtattgacgccgggcaagagcaactcggtcgccgcatacactattctcagaatgacttggttgagtactcaccagtcacagaaaagcatcttacggatggcatgacagtaagagaattatgcagtgctgccataaccatgagtgataacactgcggccaacttacttctgacaacgatcggaggaccgaaggagctaaccgcttttttgcacaacatgggggatcatgtaactcgccttgatcgttgggaaccggagctgaatgaagccataccaaacgacgagcgtgacaccacgatgcctgtagcaatggcaacaacgttgcgcaaactattaactggcgaactacttactctagcttcccggcaacaattaatagactggatggaggcggataaagttgcaggaccacttctgcgctcggcccttccggctggctggtttattgctgataaatctggagccggtgagcgtggaagccgcggtatcattgcagcactggggccagatggtaagccctcccgtatcgtagttatctacacgacggggagtcaggcaactatggatgaacgaaatagacagatcgctgagataggtgcctcactgattaagcattggtaactgtcagaccaagtttactcatatatactttagattgatttaaaacttcatttttaatttaaaaggatctaggtgaagatcctttttgataatctcatgaccaaaatcccttaacgtgagttttcgttccactgagcgtcagaccccgtagaaaagatcaaaggatcttcttgagatcctttttttctgcgcgtaatctgctgcttgcaaacaaaaaaaccaccgctaccagcggtggtttgtttgccggatcaagagctaccaactctttttccgaaggtaactggcttcagcagagcgcagataccaaatactgttcttctagtgtagccgtagttaggccaccacttcaagaactctgtagcaccgcctacatacctcgctctgctaatcctgttaccagtggctgctgccagtggcgataagtcgtgtcttaccgggttggactcaagacgatagttaccggataaggcgcagcggtcgggctgaacggggggttcgtgcacacagcccagcttggagcgaacgacctacaccgaactgagatacctacagcgtgagctatgagaaagcgccacgcttcccgaagggagaaaggcggacaggtatccggtaagcggcagggtcggaacaggagagcgcacgagggagcttccagggggaaacgcctggtatctttatagtcctgtcgggtttcgccacctctgacttgagcgtcgatttttgtgatgctcgtcaggggggcggagcctatggaaaaacgccagcaacgcggcctttttacggttcctggccttttgctggccttttgctcacatgt

SEQ ID NO: 104 - RNA, 7997 nt, synthetic construct
  source 1..7997: mol_type = other RNA
cctgcaggcagctgcgcgctcgctcgctcactgaggccgcccgggcgtcgggcgacctttggtcgcccggcctcagtgagcgagcgagcgcgcagagagggagtggccaactccatcactaggggttcctgcggcctctagactcgaggcgttgacattgattattgactagttattaatagtaatcaattacggggtcattagttcatagcccatatatggagttccgcgttacataacttacggtaaatggcccgcctggctgaccgcccaacgacccccgcccattgacgtcaataatgacgtatgttcccatagtaacgccaatagggactttccattgacgtcaatgggtggagtatttacggtaaactgcccacttggcagtacatcaagtgtatcatatgccaagtacgccccctattgacgtcaatgacggtaaatggcccgcctggcattatgcccagtacatgaccttatgggactttcctacttggcagtacatctacgtattagtcatcgctattaccatggtgatgcggttttggcagtacatcaatgggcgtggatagcggtttgactcacggggatttccaagtctccaccccattgacgtcaatgggagtttgttttggcaccaaaatcaacgggactttccaaaatgtcgtaacaactccgccccattgacgcaaatgggcggtaggcgtgtacggtgggaggtctatataagcagagctctctggctaactaccggtgccaccatggccccaaagaagaagcggaaggtcggtatccacggagtcccagcagccaagcggaactacatcctgggcctggccatcggcatcaccagcgtgggctacggcatcatcgactacgagacacgggacgtgatcgatgccggcgtgcggctgttcaaagaggccaacgtggaaaacaacgagggcaggcggagcaagagaggcgccagaaggctgaagcggcggaggcggcatagaatccagagagtgaagaagctgctgttcgactacaacctgctgaccgaccacagcgagctgagcggcatcaacccctacgaggccagagtgaagggcctgagccagaagctgagcgaggaagagttctctgccgccctgctgcacctggccaagagaagaggcgtgcacaacgtgaacgaggtggaagaggacaccggcaacgagctgtccaccaaagagcagatcagccggaacagcaaggccctggaagagaaatacgtggccgaactgcagctggaacggctgaagaaagacggcgaagtgcggggcagcatcaacagattcaagaccagcgactacgtgaaagaagccaaacagctgctgaaggtgcagaaggcctaccaccagctggaccagagcttcatcgacacctacatcgacctgctggaaacccggcggacctactatgagggacctggcgagggcagccccttcggctggaaggacatcaaagaatggtacgagatgctgatgggccactgcacctacttccccgaggaactgcggagcgtgaagtacgcctacaacgccgacctgtacaacgccctgaacgacctgaacaatctcgtgatcaccagggacgagaacgagaagctggaatattacgagaagttccagatcatcgagaacgtgttcaagcagaagaagaagcccaccctgaagcagatcgccaaagaaatcctcgtgaacgaagaggatattaagggctacagagtgaccagcaccggcaagcccgagttcaccaacctgaaggtgtaccacgacatcaaggacattaccgcccggaaagagattattgagaacgccgagctgctggatcagattgccaagatcctgaccatctaccagagcagcgaggacatccaggaagaactgaccaatctgaactccgagctgacccaggaagagatcgagcagatctctaatctgaagggctataccggcacccacaacctgagcctgaaggccatcaacctgatcctggacgagctgtggcacaccaacgacaaccagatcgctatcttcaaccggctgaagctggtgcccaagaaggtggacctgtcccagcagaaagagatccccaccaccctggtggacgacttcatcctgagccccgtcgtgaagagaagcttcatccagagcatcaaagtgatcaacgccatcatcaagaagtacggcctgcccaacgacatcattatcgagctggcccgcgagaagaactccaaggacgcccagaaaatgatcaacgagatgcagaagcggaaccggcagaccaacgagcggatcgaggaaatcatccggaccaccggcaaagagaacgccaagtacctgatcgagaagatcaagctgcacgacatgcaggaaggcaagtgcctgtacagcctggaagccatccctctggaagatctgctgaacaaccccttcaactatgaggtggaccacatcatccccagaagcgtgtccttcgacaacagcttcaacaacaaggtgctcgtgaagcaggaagaagccagcaagaagggcaaccggaccccattccagtacctgagcagcagcgacagcaagatcagctacgaaaccttcaagaagcacatcctgaatctggccaagggcaagggcagaatcagcaagaccaagaaagagtatctgctggaagaacgggacatcaacaggttctccgtgcagaaagacttcatcaaccggaacctggtggataccagatacgccaccagaggcctgatgaacctgctgcggagctacttcagagtgaacaacctggacgtgaaagtgaagtccatcaatggcggcttcaccagctttctgcggcggaagtggaagtttaagaaagagcggaacaaggggtacaagcaccacgccgaggacgccctgatcattgccaacgccgatttcatcttcaaagagtggaagaaactggacaaggccaaaaaagtgatggaaaaccagatgttcgaggaaaagcaggccgagagcatgcccgagatcgaaaccgagcaggagtacaaagagatcttcatcaccccccaccagatcaagcacattaaggacttcaaggactacaagtacagccaccgggtggacaagaagcctaatagagagctgattaacgacaccctgtactccacccggaaggacgacaagggcaacaccctgatcgtgaacaatctgaacggcctgtacgacaaggacaatgacaagctgaaaaagctgatcaacaagagccccgaaaagctgctgatgtaccaccacgacccccagacctaccagaaactgaagctgattatggaacagtacggcgacgagaagaatcccctgtacaagtactacgaggaaaccgggaactacctgaccaagtactccaaaaaggacaacggccccgtgatcaagaagattaagtattacggcaacaaactgaacgcccatctggacatcaccgacgactaccccaacagcagaaacaaggtcgtgaagctgtccctgaagccctacagattcgacgtgtacctggacaatggcgtgtacaagttcgtgaccgtgaagaatctggatgtgatcaaaaaagaaaactactacgaagtgaatagcaagtgctatgaggaagctaagaagctgaagaagatcagcaaccaggccgagtttatcgcctccttctacaacaacgatctgatcaagatcaacggcgagctgtatagagtgatcggcgtgaacaacgacctgctgaaccggatcgaagtgaacatgatcgacatcacctaccgcgagtacctggaaaacatgaacgacaagaggccccccaggatcattaagacaatcgcctccaagacccagagcattaagaagtacagcacagacattctgggcaacctgtatgaagtgaaatctaagaagcaccctcagatcatcaaaaagggcaaaaggccggcggccacgaaaaaggccggccaggcaaaaaagaaaaagggatccggacgggctgacgcattggacgattttgatctggatatgctgggaagtgacgccctcgatgattttgaccttgacatgcttggttcggatgcccttgatgactttgacctcgacatgctcggcagtgacgcccttgatgatttcgacctggacatgctgattaactgtacaggcagtggagagggcagaggaagtctgctaacatgcggtgacgtcgaggagaatcctggcccaatggccaagcctttgtctcaagaagaatccaccctcattgaaagagcaacggctacaatcaacagcatccccatctctgaagactacagcgtcgccagcgcagctctctctagcgacggccgcatcttcactggtgtcaatgtatatcattttactgggggaccttgtgcagaactcgtggtgctgggcactgctgctgctgcggcagctggcaacctgacttgtatcgtcgcgatcggaaatgagaacaggggcatcttgagcccctgcggacggtgccgacaggtgcttctcgatctgcatcctgggatcaaagccatagtgaaggacagtgatggacagccgacggcagttgggattcgtgaattgctgccctctggttatgtgtgggagggctaagaattcctagagctcgctgatcagcctcgactgtgccttctagttgccagccatctgttgtttgcccctcccccgtgccttccttgaccctggaaggtgccactcccactgtcctttcctaataaaatgaggaaattgcatcgcattgtctgagtaggtgtcattctattctggggggtggggtggggcaggacagcaagggggaggattgggaagagaatagcaggcatgctggggaggtaccgagggcctatttcccatgattccttcatatttgcatatacgatacaaggctgttagagagataattggaattaatttgactgtaaacacaaagatattagtacaaaatacgtgacgtagaaagtaataatttcttgggtagtttgcagttttaaaattatgttttaaaatggactatcatatgcttaccgtaacttgaaagtatttcgatttcttggctttatatatcttgtggaaaggacgaaacaccgtagcgatcgcaggagccgggggttttagtactctggaaacagaatctactaaaacaaggcaaaatgccgtgtttatctcgtcaacttgttggcgagatttttgcggccgcaggaacccctagtgatggagttggccactccctctctgcgcgctcgctcgctcactgaggccgggcgaccaaaggtcgcccgacgcccgggctttgcccgggcggcctcagtgagcgagcgagcgcgcagctgcctgcaggggcgcctgatgcggtattttctccttacgcatctgtgcggtatttcacaccgcatacgtcaaagcaaccatagtacgcgccctgtagcggcgcattaagcgcggcgggtgtggtggttacgcgcagcgtgaccgctacacttgccagcgccttagcgcccgctcctttcgctttcttcccttcctttctcgccacgttcgccggctttccccgtcaagctctaaatcgggggctccctttagggttccgatttagtgctttacggcacctcgaccccaaaaaacttgatttgggtgatggttcacgtagtgggccatcgccctgatagacggtttttcgccctttgacgttggagtccacgttctttaatagtggactcttgttccaaactggaacaacactcaactctatctcgggctattcttttgatttataagggattttgccgatttcggtctattggttaaaaaatgagctgatttaacaaaaatttaacgcgaattttaacaaaatattaacgtttacaattttatggtgcactctcagtacaatctgctctgatgccgcatagttaagccagccccgacacccgccaacacccgctgacgcgccctgacgggcttgtctgctcccggcatccgcttacagacaagctgtgaccgtctccgggagctgcatgtgtcagaggttttcaccgtcatcaccgaaacgcgcgagacgaaagggcctcgtgatacgcctatttttataggttaatgtcatgataataatggtttcttagacgtcaggtggcacttttcggggaaatgtgcgcggaacccctatttgtttatttttctaaatacattcaaatatgtatccgctcatgagacaataaccctgataaatgcttcaataatattgaaaaaggaagagtatgagtattcaacatttccgtgtcgcccttattcccttttttgcggcattttgccttcctgtttttgctcacccagaaacgctggtgaaagtaaaagatgctgaagatcagttgggtgcacgagtgggttacatcgaactggatctcaacagcggtaagatccttgagagttttcgccccgaagaacgttttccaatgatgagcacttttaaagttctgctatgtggcgcggtattatcccgtattgacgccgggcaagagcaactcggtcgccgcatacactattctcagaatgacttggttgagtactcaccagtcacagaaaagcatcttacggatggcatgacagtaagagaattatgcagtgctgccataaccatgagtgataacactgcggccaacttacttctgacaacgatcggaggaccgaaggagctaaccgcttttttgcacaacatgggggatcatgtaactcgccttgatcgttgggaaccggagctgaatgaagccataccaaacgacgagcgtgacaccacgatgcctgtagcaatggcaacaacgttgcgcaaactattaactggcgaactacttactctagcttcccggcaacaattaatagactggatggaggcggataaagttgcaggaccacttctgcgctcggcccttccggctggctggtttattgctgataaatctggagccggtgagcgtggaagccgcggtatcattgcagcactggggccagatggtaagccctcccgtatcgtagttatctacacgacggggagtcaggcaactatggatgaacgaaatagacagatcgctgagataggtgcctcactgattaagcattggtaactgtcagaccaagtttactcatatatactttagattgatttaaaacttcatttttaatttaaaaggatctaggtgaagatcctttttgataatctcatgaccaaaatcccttaacgtgagttttcgttccactgagcgtcagaccccgtagaaaagatcaaaggatcttcttgagatcctttttttctgcgcgtaatctgctgcttgcaaacaaaaaaaccaccgctaccagcggtggtttgtttgccggatcaagagctaccaactctttttccgaaggtaactggcttcagcagagcgcagataccaaatactgttcttctagtgtagccgtagttaggccaccacttcaagaactctgtagcaccgcctacatacctcgctctgctaatcctgttaccagtggctgctgccagtggcgataagtcgtgtcttaccgggttggactcaagacgatagttaccggataaggcgcagcggtcgggctgaacggggggttcgtgcacacagcccagcttggagcgaacgacctacaccgaactgagatacctacagcgtgagctatgagaaagcgccacgcttcccgaagggagaaaggcggacaggtatccggtaagcggcagggtcggaacaggagagcgcacgagggagcttccagggggaaacgcctggtatctttatagtcctgtcgggtttcgccacctctgacttgagcgtcgatttttgtgatgctcgtcaggggggcggagcctatggaaaaacgccagcaacgcggcctttttacggttcctggccttttgctggccttttgctcacatgt

SEQ ID NO: 105 - RNA, 21 nt, synthetic construct
  source 1..21: mol_type = other RNA
ggaggctggagccactgccgc

SEQ ID NO: 106 - RNA, 21 nt, synthetic construct
  source 1..21: mol_type = other RNA
ctgggggcgggaagtggctgt

SEQ ID NO: 107 - RNA, 21 nt, synthetic construct
  source 1..21: mol_type = other RNA
acttcccgcccccagcggcgg

SEQ ID NO: 108 - RNA, 7996 nt, synthetic construct
  source 1..7996: mol_type = other RNA
cctgcaggcagctgcgcgctcgctcgctcactgaggccgcccgggcgtcgggcgacctttggtcgcccggcctcagtgagcgagcgagcgcgcagagagggagtggccaactccatcactaggggttcctgcggcctctagactcgaggcgttgacattgattattgactagttattaatagtaatcaattacggggtcattagttcatagcccatatatggagttccgcgttacataacttacggtaaatggcccgcctggctgaccgcccaacgacccccgcccattgacgtcaataatgacgtatgttcccatagtaacgccaatagggactttccattgacgtcaatgggtggagtatttacggtaaactgcccacttggcagtacatcaagtgtatcatatgccaagtacgccccctattgacgtcaatgacggtaaatggcccgcctggcattatgcccagtacatgaccttatgggactttcctacttggcagtacatctacgtattagtcatcgctattaccatggtgatgcggttttggcagtacatcaatgggcgtggatagcggtttgactcacggggatttccaagtctccaccccattgacgtcaatgggagtttgttttggcaccaaaatcaacgggactttccaaaatgtcgtaacaactccgccccattgacgcaaatgggcggtaggcgtgtacggtgggaggtctatataagcagagctctctggctaactaccggtgccaccatggccccaaagaagaagcggaaggtcggtatccacggagtcccagcagccaagcggaactacatcctgggcctggccatcggcatcaccagcgtgggctacggcatcatcgactacgagacacgggacgtgatcgatgccggcgtgcggctgttcaaagaggccaacgtggaaaacaacgagggcaggcggagcaagagaggcgccagaaggctgaagcggcggaggcggcatagaatccagagagtgaagaagctgctgttcgactacaacctgctgaccgaccacagcgagctgagcggcatcaacccctacgaggccagagtgaagggcctgagccagaagctgagcgaggaagagttctctgccgccctgctgcacctggccaagagaagaggcgtgcacaacgtgaacgaggtggaagaggacaccggcaacgagctgtccaccaaagagcagatcagccggaacagcaaggccctggaagagaaatacgtggccgaactgcagctggaacggctgaagaaagacggcgaagtgcggggcagcatcaacagattcaagaccagcgactacgtgaaagaagccaaacagctgctgaaggtgcagaaggcctaccaccagctggaccagagcttcatcgacacctacatcgacctgctggaaacccggcggacctactatgagggacctggcgagggcagccccttcggctggaaggacatcaaagaatggtacgagatgctgatgggccactgcacctacttccccgaggaactgcggagcgtgaagtacgcctacaacgccgacctgtacaacgccctgaacgacctgaacaatctcgtgatcaccagggacgagaacgagaagctggaatattacgagaagttccagatcatcgagaacgtgttcaagcagaagaagaagcccaccctgaagcagatcgccaaagaaatcctcgtgaacgaagaggatattaagggctacagagtgaccagcaccggcaagcccgagttcaccaacctgaaggtgtaccacgacatcaaggacattaccgcccggaaagagattattgagaacgccgagctgctggatcagattgccaagatcctgaccatctaccagagcagcgaggacatccaggaagaactgaccaatctgaactccgagctgacccaggaagagatcgagcagatctctaatctgaagggctataccggcacccacaacctgagcctgaaggccatcaacctgatcctggacgagctgtggcacaccaacgacaaccagatcgctatcttcaaccggctgaagctggtgcccaagaaggtggacctgtcccagcagaaagagatccccaccaccctggtggacgacttcatcctgagccccgtcgtgaagagaagcttcatccagagcatcaaagtgatcaacgccatcatcaagaagtacggcctgcccaacgacatcattatcgagctggcccgcgagaagaactccaaggacgcccagaaaatgatcaacgagatgcagaagcggaaccggcagaccaacgagcggatcgaggaaatcatccggaccaccggcaaagagaacgccaagtacctgatcgagaagatcaagctgcacgacatgcaggaaggcaagtgcctgtacagcctggaagccatccctctggaagatctgctgaacaaccccttcaactatgaggtggaccacatcatccccagaagcgtgtccttcgacaacagcttcaacaacaaggtgctcgtgaagcaggaagaagccagcaagaagggcaaccggaccccattccagtacctgagcagcagcgacagcaagatcagctacgaaaccttcaagaagcacatcctgaatctggccaagggcaagggcagaatcagcaagaccaagaaagagtatctgctggaagaacgggacatcaacaggttctccgtgcagaaagacttcatcaaccggaacctggtggataccagatacgccaccagaggcctgatgaacctgctgcggagctacttcagagtgaacaacctggacgtgaaagtgaagtccatcaatggcggcttcaccagctttctgcggcggaagtggaagtttaagaaagagcggaacaaggggtacaagcaccacgccgaggacgccctgatcattgccaacgccgatttcatcttcaaagagtggaagaaactggacaaggccaaaaaagtgatggaaaaccagatgttcgaggaaaagcaggccgagagcatgcccgagatcgaaaccgagcaggagtacaaagagatcttcatcaccccccaccagatcaagcacattaaggacttcaaggactacaagtacagccaccgggtggacaagaagcctaatagagagctgattaacgacaccctgtactccacccggaaggacgacaagggcaacaccctgatcgtgaacaatctgaacggcctgtacgacaaggacaatgacaagctgaaaaagctgatcaacaagagccccgaaaagctgctgatgtaccaccacgacccccagacctaccagaaactgaagctgattatggaacagtacggcgacgagaagaatcccctgtacaagtactacgaggaaaccgggaactacctgaccaagtactccaaaaaggacaacggccccgtgatcaagaagattaagtattacggcaacaaactgaacgcccatctggacatcaccgacgactaccccaacagcagaaacaaggtcgtgaagctgtccctgaagccctacagattcgacgtgtacctggacaatggcgtgtacaagttcgtgaccgtgaagaatctggatgtgatcaaaaaagaaaactactacgaagtgaatagcaagtgctatgaggaagctaagaagctgaagaagatcagcaaccaggccgagtttatcgcctccttctacaacaacgatctgatcaagatcaacggcgagctgtatagagtgatcggcgtgaacaacgacctgctgaaccggatcgaagtgaacatgatcgacatcacctaccgcgagtacctggaaaacatgaacgacaagaggccccccaggatcattaagacaatcgcctccaagacccagagcattaagaagtacagcacagacattctgggcaacctgtatgaagtgaaatctaagaagcaccctcagatcatcaaaaagggcaaaaggccggcggccacgaaaaaggccggccaggcaaaaaagaaaaagggatccggacgggctgacgcattggacgattttgatctggatatgctgggaagtgacgccctcgatgattttgaccttgacatgcttggttcggatgcccttgatgactttgacctcgacatgctcggcagtgacgcccttgatgatttcgacctggacatgctgattaactgtacaggcagtggagagggcagaggaagtctgctaacatgcggtgacgtcgaggagaatcctggcccaatggccaagcctttgtctcaagaagaatccaccctcattgaaagagcaacggctacaatcaacagcatccccatctctgaagactacagcgtcgccagcgcagctctctctagcgacggccgcatcttcactggtgtcaatgtatatcattttactgggggaccttgtgcagaactcgtggtgctgggcactgctgctgctgcggcagctggcaacctgacttgtatcgtcgcgatcggaaatgagaacaggggcatcttgagcccctgcggacggtgccgacaggtgcttctcgatctgcatcctgggatcaaagccatagtgaaggacagtgatggacagccgacggcagttgggattcgtgaattgctgccctctggttatgtgtgggagggctaagaattcctagagctcgctgatcagcctcgactgtgccttctagttgccagccatctgttgtttgcccctcccccgtgccttccttgaccctggaaggtgccactcccactgtcctttcctaataaaatgaggaaattgcatcgcattgtctgagtaggtgtcattctattctggggggtggggtggggcaggacagcaagggggaggattgggaagagaatagcaggcatgctggggaggtaccgagggcctatttcccatgattccttcatatttgcatatacgatacaaggctgttagagagataattggaattaatttgactgtaaacacaaagatattagtacaaaatacgtgacgtagaaagtaataatttcttgggtagtttgcagttttaaaattatgttttaaaatggactatcatatgcttaccgtaacttgaaagtatttcgatttcttggctttatatatcttgtggaaaggacgaaacaccggaggctggagccactgccgcgttttagtactctggaaacagaatctactaaaacaaggcaaaatgccgtgtttatctcgtcaacttgttggcgagatttttgcggccgcaggaacccctagtgatggagttggccactccctctctgcgcgctcgctcgctcactgaggccgggcgaccaaaggtcgcccgacgcccgggctttgcccgggcggcctcagtgagcgagcgagcgcgcagctgcctgcaggggcgcctgatgcggtattttctccttacgcatctgtgcggtatttcacaccgcatacgtcaaagcaaccatagtacgcgccctgtagcggcgcattaagcgcggcgggtgtggtggttacgcgcagcgtgaccgctacacttgccagcgccttagcgcccgctcctttcgctttcttcccttcctttctcgccacgttcgccggctttccccgtcaagctctaaatcgggggctccctttagggttccgatttagtgctttacggcacctcgaccccaaaaaacttgatttgggtgatggttcacgtagtgggccatcgccctgatagacggtttttcgccctttgacgttggagtccacgttctttaatagtggactcttgttccaaactggaacaacactcaactctatctcgggctattcttttgatttataagggattttgccgatttcggtctattggttaaaaaatgagctgatttaacaaaaatttaacgcgaattttaacaaaatattaacgtttacaattttatggtgcactctcagtacaatctgctctgatgccgcatagttaagccagccccgacacccgccaacacccgctgacgcgccctgacgggcttgtctgctcccggcatccgcttacagacaagctgtgaccgtctccgggagctgcatgtgtcagaggttttcaccgtcatcaccgaaacgcgcgagacgaaagggcctcgtgatacgcctatttttataggttaatgtcatgataataatggtttcttagacgtcaggtggcacttttcggggaaatgtgcgcggaacccctatttgtttatttttctaaatacattcaaatatgtatccgctcatgagacaataaccctgataaatgcttcaataatattgaaaaaggaagagtatgagtattcaacatttccgtgtcgcccttattcccttttttgcggcattttgccttcctgtttttgctcacccagaaacgctggtgaaagtaaaagatgctgaagatcagttgggtgcacgagtgggttacatcgaactggatctcaacagcggtaagatccttgagagttttcgccccgaagaacgttttccaatgatgagcacttttaaagttctgctatgtggcgcggtattatcccgtattgacgccgggcaagagcaactcggtcgccgcatacactattctcagaatgacttggttgagtactcaccagtcacagaaaagcatcttacggatggcatgacagtaagagaattatgcagtgctgccataaccatgagtgataacactgcggccaacttacttctgacaacgatcggaggaccgaaggagctaaccgcttttttgcacaacatgggggatcatgtaactcgccttgatcgttgggaaccggagctgaatgaagccataccaaacgacgagcgtgacaccacgatgcctgtagcaatggcaacaacgttgcgcaaactattaactggcgaactacttactctagcttcccggcaacaattaatagactggatggaggcggataaagttgcaggaccacttctgcgctcggcccttccggctggctggtttattgctgataaatctggagccggtgagcgtggaagccgcggtatcattgcagcactggggccagatggtaagccctcccgtatcgtagttatctacacgacggggagtcaggcaactatggatgaacgaaatagacagatcgctgagataggtgcctcactgattaagcattggtaactgtcagaccaagtttactcatatatactttagattgatttaaaacttcatttttaatttaaaaggatctaggtgaagatcctttttgataatctcatgaccaaaatcccttaacgtgagttttcgttccactgagcgtcagaccccgtagaaaagatcaaaggatcttcttgagatcctttttttctgcgcgtaatctgctgcttgcaaacaaaaaaaccaccgctaccagcggtggtttgtttgccggatcaagagctaccaactctttttccgaaggtaactggcttcagcagagcgcagataccaaatactgttcttctagtgtagccgtagttaggccaccacttcaagaactctgtagcaccgcctacatacctcgctctgctaatcctgttaccagtggctgctgccagtggcgataagtcgtgtcttaccgggttggactcaagacgatagttaccggataaggcgcagcggtcgggctgaacggggggttcgtgcacacagcccagcttggagcgaacgacctacaccgaactgagatacctacagcgtgagctatgagaaagcgccacgcttcccgaagggagaaaggcggacaggtatccggtaagcggcagggtcggaacaggagagcgcacgagggagcttccagggggaaacgcctggtatctttatagtcctgtcgggtttcgccacctctgacttgagcgtcgatttttgtgatgctcgtcaggggggcggagcctatggaaaaacgccagcaacgcggcctttttacggttcctggccttttgctggccttttgctcacatgt

SEQ ID NO: 109 - RNA, 7997 nt, synthetic construct
  source 1..7997: mol_type = other RNA
cctgcaggcagctgcgcgctcgctcgctcactgaggccgcccgggcgtcgggcgacctttggtcgcccggcctcagtgagcgagcgagcgcgcagagagggagtggccaactccatcactaggggttcctgcggcctctagactcgaggcgttgacattgattattgactagttattaatagtaatcaattacggggtcattagttcatagcccatatatggagttccgcgttacataacttacggtaaatggcccgcctggctgaccgcccaacgacccccgcccattgacgtcaataatgacgtatgttcccatagtaacgccaatagggactttccattgacgtcaatgggtggagtatttacggtaaactgcccacttggcagtacatcaagtgtatcatatgccaagtacgccccctattgacgtcaatgacggtaaatggcccgcctggcattatgcccagtacatgaccttatgggactttcctacttggcagtacatctacgtattagtcatcgctattaccatggtgatgcggttttggcagtacatcaatgggcgtggatagcggtttgactcacggggatttccaagtctccaccccattgacgtcaatgggagtttgttttggcaccaaaatcaacgggactttccaaaatgtcgtaacaactccgccccattgacgcaaatgggcggtaggcgtgtacggtgggaggtctatataagcagagctctctggctaactaccggtgccaccatggccccaaagaagaagcggaaggtcggtatccacggagtcccagcagccaagcggaactacatcctgggcctggccatcggcatcaccagcgtgggctacggcatcatcgactacgagacacgggacgtgatcgatgccggcgtgcggctgttcaaagaggccaacgtggaaaacaacgagggcaggcggagcaagagaggcgccagaaggctgaagcggcggaggcggcatagaatccagagagtgaagaagctgctgttcgactacaacctgctgaccgaccacagcgagctgagcggcatcaacccctacgaggccagagtgaagggcctgagccagaagctgagcgaggaagagttctctgccgccctgctgcacctggccaagagaagaggcgtgcacaacgtgaacgaggtggaagaggacaccggcaacgagctgtccaccaaagagcagatcagccggaacagcaaggccctggaagagaaatacgtggccgaactgcagctggaacggctgaagaaagacggcgaagtgcggggcagcatcaacagattcaagaccagcgactacgtgaaagaagccaaacagctgctgaaggtgcagaaggcctaccaccagctggaccagagcttcatcgacacctacatcgacctgctggaaacccggcggacctactatgagggacctggcgagggcagccccttcggctggaaggacatcaaagaatggtacgagatgctgatgggccactgcacctacttccccgaggaactgcggagcgtgaagtacgcctacaacgccgacctgtacaacgccctgaacgacctgaacaatctcgtgatcaccagggacgagaacgagaagctggaatattacgagaagttccagatcatcgagaacgtgttcaagcagaagaagaagcccaccctgaagcagatcgccaaagaaatcctcgtgaacgaagaggatattaagggctacagagtgaccagcaccggcaagcccgagttcaccaacctgaaggtgtaccacgacatcaaggacattaccgcccggaaagagattattgagaacgccgagctgctggatcagattgccaagatcctgaccatctaccagagcagcgaggacatccaggaagaactgaccaatctgaactccgagctgacccaggaagagatcgagcagatctctaatctgaagggctataccggcacccacaacctgagcctgaaggccatcaacctgatcctggacgagctgtggcacaccaacgacaaccagatcgctatcttcaaccggctgaagctggtgcccaagaaggtggacctgtcccagcagaaagagatccccaccaccctggtggacgacttcatcctgagccccgtcgtgaagagaagcttcatccagagcatcaaagtgatcaacgccatcatcaagaagtacggcctgcccaacgacatcattatcgagctggcccgcgagaagaactccaaggacgcccagaaaatgatcaacgagatgcagaagcggaaccggcagaccaacgagcggatcgaggaaatcatccggaccaccggcaaagagaacgccaagtacctgatcgagaagatcaagctgcacgacatgcaggaaggcaagtgcctgtacagcctggaagccatccctctggaagatctgctgaacaaccccttcaactatgaggtggaccacatcatccccagaagcgtgtccttcgacaacagcttcaacaacaaggtgctcgtgaagcaggaagaagccagcaagaagggcaaccggaccccattccagtacctgagcagcagcgacagcaagatcagctacgaaaccttcaagaagcacatcctgaatctggccaagggcaagggcagaatcagcaagaccaagaaagagtatctgctggaagaacgggacatcaacaggttctccgtgcagaaagacttcatcaaccggaacctggtggataccagatacgccaccagaggcctgatgaacctgctgcggagctacttcagagtgaacaacctggacgtgaaagtgaagtccatcaatggcggcttcaccagctttctgcggcggaagtggaagtttaagaaagagcggaacaaggggtacaagcaccacgccgaggacgccctgatcattgccaacgccgatttcatcttcaaagagtggaagaaactggacaaggccaaaaaagtgatggaaaaccagatgttcgaggaaaagcaggccgagagcatgcccgagatcgaaaccgagcaggagtacaaagagatcttcatcaccccccaccagatcaagcacattaaggacttcaaggactacaagtacagccaccgggtggacaagaagcctaatagagagctgattaacgacaccctgtactccacccggaaggacgacaagggcaacaccctgatcgtgaacaatctgaacggcctgtacgacaaggacaatgacaagctgaaaaagctgatcaacaagagccccgaaaagctgctgatgtaccaccacgacccccagacctaccagaaactgaagctgattatggaacagtacggcgacgagaagaatcccctgtacaagtactacgaggaaaccgggaactacctgaccaagtactccaaaaaggacaacggccccgtgatcaagaagattaagtattacggcaacaaactgaacgcccatctggacatcaccgacgactaccccaacagcagaaacaaggtcgtgaagctgtccctgaagccctacagattcgacgtgtacctggacaatggcgtgtacaagttcgtgaccgtgaagaatctggatgtgatcaaaaaagaaaactactacgaagtgaatagcaagtgctatgaggaagctaagaagctgaagaagatcagcaaccaggccgagtttatcgcctccttctacaacaacgatctgatcaagatcaacggcgagctgtatagagtgatcggcgtgaacaacgacctgctgaaccggatcgaagtgaacatgatcgacatcacctaccgcgagtacctggaaaacatgaacgacaagaggccccccaggatcattaagacaatcgcctccaagacccagagcattaagaagtacagcacagacattctgggcaacctgtatgaagtgaaatctaagaagcaccctcagatcatcaaaaagggcaaaaggccggcggccacgaaaaaggccggccaggcaaaaaagaaaaagggatccggacgggctgacgcattggacgattttgatctggatatgctgggaagtgacgccctcgatgattttgaccttgacatgcttggttcggatgcccttgatgactttgacctcgacatgctcggcagtgacgcccttgatgatttcgacctggacatgctgattaactgtacaggcagtggagagggcagaggaagtctgctaacatgcggtgacgtcgaggagaatcctggcccaatggccaagcctttgtctcaagaagaatccaccctcattgaaagagcaacggctacaatcaacagcatccccatctctgaagactacagcgtcgccagcgcagctctctctagcgacggccgcatcttcactggtgtcaatgtatatcattttactgggggaccttgtgcagaactcgtggtgctgggcactgctgctgctgcggcagctggcaacctgacttgtatcgtcgcgatcggaaatgagaacaggggcatcttgagcccctgcggacggtgccgacaggtgcttctcgatctgcatcctgggatcaaagccatagtgaaggacagtgatggacagccgacggcagttgggattcgtgaattgctgccctctggttatgtgtgggagggctaagaattcctagagctcgctgatcagcctcgactgtgccttctagttgccagccatctgttgtttgcccctcccccgtgccttccttgaccctggaaggtgccactcccactgtcctttcctaataaaatgaggaaattgcatcgcattgtctgagtaggtgtcattctattctggggggtggggtggggcaggacagcaagggggaggattgggaagagaatagcaggcatgctggggaggtaccgagggcctatttcccatgattccttcatatttgcatatacgatacaaggctgttagagagataattggaattaatttgactgtaaacacaaagatattagtacaaaatacgtgacgtagaaagtaataatttcttgggtagtttgcagttttaaaattatgttttaaaatggactatcatatgcttaccgtaacttgaaagtatttcgatttcttggctttatatatcttgtggaaaggacgaaacaccgctgggggcgggaagtggctgtgttttagtactctggaaacagaatctactaaaacaaggcaaaatgccgtgtttatctcgtcaacttgttggcgagatttttgcggccgcaggaacccctagtgatggagttggccactccctctctgcgcgctcgctcgctcactgaggccgggcgaccaaaggtcgcccgacgcccgggctttgcccgggcggcctcagtgagcgagcgagcgcgcagctgcctgcaggggcgcctgatgcggtattttctccttacgcatctgtgcggtatttcacaccgcatacgtcaaagcaaccatagtacgcgccctgtagcggcgcattaagcgcggcgggtgtggtggttacgcgcagcgtgaccgctacacttgccagcgccttagcgcccgctcctttcgctttcttcccttcctttctcgccacgttcgccggctttccccgtcaagctctaaatcgggggctccctttagggttccgatttagtgctttacggcacctcgaccccaaaaaacttgatttgggtgatggttcacgtagtgggccatcgccctgatagacggtttttcgccctttgacgttggagtccacgttctttaatagtggactcttgttccaaactggaacaacactcaactctatctcgggctattcttttgatttataagggattttgccgatttcggtctattggttaaaaaatgagctgatttaacaaaaatttaacgcgaattttaacaaaatattaacgtttacaattttatggtgcactctcagtacaatctgctctgatgccgcatagttaagccagccccgacacccgccaacacccgctgacgcgccctgacgggcttgtctgctcccggcatccgcttacagacaagctgtgaccgtctccgggagctgcatgtgtcagaggttttcaccgtcatcaccgaaacgcgcgagacgaaagggcctcgtgatacgcctatttttataggttaatgtcatgataataatggtttcttagacgtcaggtggcacttttcggggaaatgtgcgcggaacccctatttgtttatttttctaaatacattcaaatatgtatccgctcatgagacaataaccctgataaatgcttcaataatattgaaaaaggaagagtatgagtattcaacatttccgtgtcgcccttattcccttttttgcggcattttgccttcctgtttttgctcacccagaaacgctggtgaaagtaaaagatgctgaagatcagttgggtgcacgagtgggttacatcgaactggatctcaacagcggtaagatccttgagagttttcgccccgaagaacgttttccaatgatgagcacttttaaagttctgctatgtggcgcggtattatcccgtattgacgccgggcaagagcaactcggtcgccgcatacactattctcagaatgacttggttgagtactcaccagtcacagaaaagcatcttacggatggcatgacagtaagagaattatgcagtgctgccataaccatgagtgataacactgcggccaacttacttctgacaacgatcggaggaccgaaggagctaaccgcttttttgcacaacatgggggatcatgtaactcgccttgatcgttgggaaccggagctgaatgaagccataccaaacgacgagcgtgacaccacgatgcctgtagcaatggcaacaacgttgcgcaaactattaactggcgaactacttactctagcttcccggcaacaattaatagactggatggaggcggataaagttgcaggaccacttctgcgctcggcccttccggctggctggtttattgctgataaatctggagccggtgagcgtggaagccgcggtatcattgcagcactggggccagatggtaagccctcccgtatcgtagttatctacacgacggggagtcaggcaactatggatgaacgaaatagacagatcgctgagataggtgcctcactgattaagcattggtaactgtcagaccaagtttactcatatatactttagattgatttaaaacttcatttttaatttaaaaggatctaggtgaagatcctttttgataatctcatgaccaaaatcccttaacgtgagttttcgttccactgagcgtcagaccccgtagaaaagatcaaaggatcttcttgagatcctttttttctgcgcgtaatctgctgcttgcaaacaaaaaaaccaccgctaccagcggtggtttgtttgccggatcaagagctaccaactctttttccgaaggtaactggcttcagcagagcgcagataccaaatactgttcttctagtgtagccgtagttaggccaccacttcaagaactctgtagcaccgcctacatacctcgctctgctaatcctgttaccagtggctgctgccagtggcgataagtcgtgtcttaccgggttggactcaagacgatagttaccggataaggcgcagcggtcgggctgaacggggggttcgtgcacacagcccagcttggagcgaacgacctacaccgaactgagatacctacagcgtgagctatgagaaagcgccacgcttcccgaagggagaaaggcggacaggtatccggtaagcggcagggtcggaacaggagagcgcacgagggagcttccagggggaaacgcctggtatctttatagtcctgtcgggtttcgccacctctgacttgagcgtcgatttttgtgatgctcgtcaggggggcggagcctatggaaaaacgccagcaacgcggcctttttacggttcctggccttttgctggccttttgctcacatgt

SEQ ID NO: 110 - RNA, 7997 nt, synthetic construct
  source 1..7997: mol_type = other RNA
cctgcaggcagctgcgcgctcgctcgctcactgaggccgcccgggcgtcgggcgacctttggtcgcccggcctcagtgagcgagcgagcgcgcagagagggagtggccaactccatcactaggggttcctgcggcctctagactcgaggcgttgacattgattattgactagttattaatagtaatcaattacggggtcattagttcatagcccatatatggagttccgcgttacataacttacggtaaatggcccgcctggctgaccgcccaacgacccccgcccattgacgtcaataatgacgtatgttcccatagtaacgccaatagggactttccattgacgtcaatgggtggagtatttacggtaaactgcccacttggcagtacatcaagtgtatcatatgccaagtacgccccctattgacgtcaatgacggtaaatggcccgcctggcattatgcccagtacatgaccttatgggactttcctacttggcagtacatctacgtattagtcatcgctattaccatggtgatgcggttttggcagtacatcaatgggcgtggatagcggtttgactcacggggatttccaagtctccaccccattgacgtcaatgggagtttgttttggcaccaaaatcaacgggactttccaaaatgtcgtaacaactccgccccattgacgcaaatgggcggtaggcgtgtacggtgggaggtctatataagcagagctctctggctaactaccggtgccaccatggccccaaagaagaagcggaaggtcggtatccacggagtcccagcagccaagcggaactacatcctgggcctggccatcggcatcaccagcgtgggctacggcatcatcgactacgagacacgggacgtgatcgatgccggcgtgcggctgttcaaagaggccaacgtggaaaacaacgagggcaggcggagcaagagaggcgccagaaggctgaagcggcggaggcggcatagaatccagagagtgaagaagctgctgttcgactacaacctgctgaccgaccacagcgagctgagcggcatcaacccctacgaggccagagtgaagggcctgagccagaagctgagcgaggaagagttctctgccgccctgctgcacctggccaagagaagaggcgtgcacaacgtgaacgaggtggaagaggacaccggcaacgagctgtccaccaaagagcagatcagccggaacagcaaggccctggaagagaaatacgtggccgaactgcagctggaacggctgaagaaagacggcgaagtgcggggcagcatcaacagattcaagaccagcgactacgtgaaagaagccaaacagctgctgaaggtgcagaaggcctaccaccagctggaccagagcttcatcgacacctacatcgacctgctggaaacccggcggacctactatgagggacctggcgagggcagccccttcggctggaaggacatcaaagaatggtacgagatgctgatgggccactgcacctacttccccgaggaactgcggagcgtgaagtacgcctacaacgccgacctgtacaacgccctgaacgacctgaacaatctcgtgatcaccagggacgagaacgagaagctggaatattacgagaagttccagatcatcgagaacgtgttcaagcagaagaagaagcccaccctgaagcagatcgccaaagaaatcctcgtgaacgaagaggatattaagggctacagagtgaccagcaccggcaagcccgagttcaccaacctgaaggtgtaccacgacatcaaggacattaccgcccggaaagagattattgagaacgccgagctgctggatcagattgccaagatcctgaccatctaccagagcagcgaggacatccaggaagaactgaccaatctgaactccgagctgacccaggaagagatcgagcagatctctaatctgaagggctataccggcacccacaacctgagcctgaaggccatcaacctgatcctggacgagctgtggcacaccaacgacaaccagatcgctatcttcaaccggctgaagctggtgcccaagaaggtggacctgtcccagcagaaagagatccccaccaccctggtggacgacttcatcctgagccccgtcgtgaagagaagcttcatccagagcatcaaagtgatcaacgccatcatcaagaagtacggcctgcccaacgacatcattatcgagctggcccgcgagaagaactccaaggacgcccagaaaatgatcaacgagatgcagaagcggaaccggcagaccaacgagcggatcgaggaaatcatccggaccaccggcaaagagaacgccaagtacctgatcgagaagatcaagctgcacgacatgcaggaaggcaagtgcctgtacagcctggaagccatccctctggaagatctgctgaacaaccccttcaactatgaggtggaccacatcatccccagaagcgtgtccttcgacaacagcttcaacaacaaggtgctcgtgaagcaggaagaagccagcaagaagggcaaccggaccccattccagtacctgagcagcagcgacagcaagatcagctacgaaaccttcaagaagcacatcctgaatctggccaagggcaagggcagaatcagcaagaccaagaaagagtatctgctggaagaacgggacatcaacaggttctccgtgcagaaagacttcatcaaccggaacctggtggataccagatacgccaccagaggcctgatgaacctgctgcggagctacttcagagtgaacaacctggacgtgaaagtgaagtccatcaatggcggcttcaccagctttctgcggcggaagtggaagtttaagaaagagcggaacaaggggtacaagcaccacgccgaggacgccctgatcattgccaacgccgatttcatcttcaaagagtggaagaaactggacaaggccaaaaaagtgatggaaaaccagatgttcgaggaaaagcaggccgagagcatgcccgagatcgaaaccgagcaggagtacaaagagatcttcatcaccccccaccagatcaagcacattaaggacttcaaggactacaagtacagccaccgggtggacaagaagcctaatagagagctgattaacgacaccctgtactccacccggaaggacgacaagggcaacaccctgatcgtgaacaatctgaacggcctgtacgacaaggacaatgacaagctgaaaaagctgatcaacaagagccccgaaaagctgctgatgtaccaccacgacccccagacctaccagaaactgaagctgattatggaacagtacggcgacgagaagaatcccctgtacaagtactacgaggaaaccgggaactacctgaccaagtactccaaaaaggacaacggccccgtgatcaagaagattaagtattacggcaacaaactgaacgcccatctggacatcaccgacgactaccccaacagcagaaacaaggtcgtgaagctgtccctgaagccctacagattcgacgtgtacctggacaatggcgtgtacaagttcgtgaccgtgaagaatctggatgtgatcaaaaaagaaaactactacgaagtgaatagcaagtgctatgaggaagctaagaagctgaagaagatcagcaaccaggccgagtttatcgcctccttctacaacaacgatctgatcaagatcaacggcgagctgtatagagtgatcggcgtgaacaacgacctgctgaaccggatcgaagtgaacatgatcgacatcacctaccgcgagtacctggaaaacatgaacgacaagaggccccccaggatcattaagacaatcgcctccaagacccagagcattaagaagtacagcacagacattctgggcaacctgtatgaagtgaaatctaagaagcaccctcagatcatcaaaaagggcaaaaggccggcggccacgaaaaaggccggccaggcaaaaaagaaaaagggatccggacgggctgacgcattggacgattttgatctggatatgctgggaagtgacgccctcgatgattttgaccttgacatgcttggttcggatgcccttgatgactttgacctcgacatgctcggcagtgacgcccttgatgatttcgacctggacatgctgattaactgtacaggcagtggagagggcagaggaagtctgctaacatgcggtgacgtcgaggagaatcctggcccaatggccaagcctttgtctcaagaagaatccaccctcattgaaagagcaacggctacaatcaacagcatccccatctctgaagactacagcgtcgccagcgcagctctctctagcgacggccgcatcttcactggtgtcaatgtatatcattttactgggggaccttgtgcagaactcgtggtgctgggcactgctgctgctgcggcagctggcaacctgacttgtatcgtcgcgatcggaaatgagaacaggggcatcttgagcccctgcggacggtgccgacaggtgcttctcgatctgcatcctgggatcaaagccatagtgaaggacagtgatggacagccgacggcagttgggattcgtgaattgctgccctctggttatgtgtgggagggctaagaattcctagagctcgctgatcagcctcgactgtgccttctagttgccagccatctgttgtttgcccctcccccgtgccttccttgaccctggaaggtgccactcccactgtcctttcctaataaaatgaggaaattgcatcgcattgtctgagtaggtgtcattctattctggggggtggggtggggcaggacagcaagggggaggattgggaagagaatagcaggcatgctggggaggtaccgagggcctatttcccatgattccttcatatttgcatatacgatacaaggctgttagagagataattggaattaatttgactgtaaacacaaagatattagtacaaaatacgtgacgtagaaagtaataatttcttgggtagtttgcagttttaaaattatgttttaaaatggactatcatatgcttaccgtaacttgaaagtatttcgatttcttggctttatatatcttgtggaaaggacgaaacaccgacttcccgcccccagcggcgggttttagtactctggaaacagaatctactaaaacaaggcaaaatgccgtgtttatctcgtcaacttgttggcgagatttttgcggccgcaggaacccctagtgatggagttggccactccctctctgcgcgctcgctcgctcactgaggccgggcgaccaaaggtcgcccgacgcccgggctttgcccgggcggcctcagtgagcgagcgagcgcgcagctgcctgcaggggcgcctgatgcggtattttctccttacgcatctgtgcggtatttcacaccgcatacgtcaaagcaaccatagtacgcgccctgtagcggcgcattaagcgcggcgggtgtggtggttacgcgcagcgtgaccgctacacttgccagcgccttagcgcccgctcctttcgctttcttcccttcctttctcgccacgttcgccggctttccccgtcaagctctaaatcgggggctccctttagggttccgatttagtgctttacggcacctcgaccccaaaaaacttgatttgggtgatggttcacgtagtgggccatcgccctgatagacggtttttcgccctttgacgttggagtccacgttctttaatagtggactcttgttccaaactggaacaacactcaactctatctcgggctattcttttgatttataagggattttgccgatttcggtctattggttaaaaaatgagctgatttaacaaaaatttaacgcgaattttaacaaaatattaacgtttacaattttatggtgcactctcagtacaatctgctctgatgccgcatagttaagccagccccgacacccgccaacacccgctgacgcgccctgacgggcttgtctgctcccggcatccgcttacagacaagctgtgaccgtctccgggagctgcatgtgtcagaggttttcaccgtcatcaccgaaacgcgcgagacgaaagggcctcgtgatacgcctatttttataggttaatgtcatgataataatggtttcttagacgtcaggtggcacttttcggggaaatgtgcgcggaacccctatttgtttatttttctaaatacattcaaatatgtatccgctcatgagacaataaccctgataaatgcttcaataatattgaaaaaggaagagtatgagtattcaacatttccgtgtcgcccttattcccttttttgcggcattttgccttcctgtttttgctcacccagaaacgctggtgaaagtaaaagatgctgaagatcagttgggtgcacgagtgggttacatcgaactggatctcaacagcggtaagatccttgagagttttcgccccgaagaacgttttccaatgatgagcacttttaaagttctgctatgtggcgcggtattatcccgtattgacgccgggcaagagcaactcggtcgccgcatacactattctcagaatgacttggttgagtactcaccagtcacagaaaagcatcttacggatggcatgacagtaagagaattatgcagtgctgccataaccatgagtgataacactgcggccaacttacttctgacaacgatcggaggaccgaaggagctaaccgcttttttgcacaacatgggggatcatgtaactcgccttgatcgttgggaaccggagctgaatgaagccataccaaacgacgagcgtgacaccacgatgcctgtagcaatggcaacaacgttgcgcaaactattaactggcgaactacttactctagcttcccggcaacaattaatagactggatggaggcggataaagttgcaggaccacttctgcgctcggcccttccggctggctggtttattgctgataaatctggagccggtgagcgtggaagccgcggtatcattgcagcactggggccagatggtaagccctcccgtatcgtagttatctacacgacggggagtcaggcaactatggatgaacgaaatagacagatcgctgagataggtgcctcactgattaagcattggtaactgtcagaccaagtttactcatatatactttagattgatttaaaacttcatttttaatttaaaaggatctaggtgaagatcctttttgataatctcatgaccaaaatcccttaacgtgagttttcgttccactgagcgtcagaccccgtagaaaagatcaaaggatcttcttgagatcctttttttctgcgcgtaatctgctgcttgcaaacaaaaaaaccaccgctaccagcggtggtttgtttgccggatcaagagctaccaactctttttccgaaggtaactggcttcagcagagcgcagataccaaatactgttcttctagtgtagccgtagttaggccaccacttcaagaactctgtagcaccgcctacatacctcgctctgctaatcctgttaccagtggctgctgccagtggcgataagtcgtgtcttaccgggttggactcaagacgatagttaccggataaggcgcagcggtcgggctgaacggggggttcgtgcacacagcccagcttggagcgaacgacctacaccgaactgagatacctacagcgtgagctatgagaaagcgccacgcttcccgaagggagaaaggcggacaggtatccggtaagcggcagggtcggaacaggagagcgcacgagggagcttccagggggaaacgcctggtatctttatagtcctgtcgggtttcgccacctctgacttgagcgtcgatttttgtgatgctcgtcaggggggcggagcctatggaaaaacgccagcaacgcggcctttttacggttcctggccttttgctggccttttgctcacatgt

SEQ ID NO: 111 - RNA, 21 nt, synthetic construct
  source 1..21: mol_type = other RNA
ggtaggggaactgcggagcga

SEQ ID NO: 112 - RNA, 21 nt, synthetic construct
  source 1..21: mol_type = other RNA
aaggacacaggtaggggaact

SEQ ID NO: 113 - RNA, 21 nt, synthetic construct
  source 1..21: mol_type = other RNA
ggaggaggatcggagatagaa

SEQ ID NO: 114 - RNA, 7996 nt, synthetic construct
  source 1..7996: mol_type = other RNA
cctgcaggcagctgcgcgctcgctcgctcactgaggccgcccgggcgtcgggcgacctttggtcgcccggcctcagtgagcgagcgagcgcgcagagagggagtggccaactccatcactaggggttcctgcggcctctagactcgaggcgttgacattgattattgactagttattaatagtaatcaattacggggtcattagttcatagcccatatatggagttccgcgttacataacttacggtaaatggcccgcctggctgaccgcccaacgacccccgcccattgacgtcaataatgacgtatgttcccatagtaacgccaatagggactttccattgacgtcaatgggtggagtatttacggtaaactgcccacttggcagtacatcaagtgtatcatatgccaagtacgccccctattgacgtcaatgacggtaaatggcccgcctggcattatgcccagtacatgaccttatgggactttcctacttggcagtacatctacgtattagtcatcgctattaccatggtgatgcggttttggcagtacatcaatgggcgtggatagcggtttgactcacggggatttccaagtctccaccccattgacgtcaatgggagtttgttttggcaccaaaatcaacgggactttccaaaatgtcgtaacaactccgccccattgacgcaaatgggcggtaggcgtgtacggtgggaggtctatataagcagagctctctggctaactaccggtgccaccatggccccaaagaagaagcggaaggtcggtatccacggagtcccagcagccaagcggaactacatcctgggcctggccatcggcatcaccagcgtgggctacggcatcatcgactacgagacacgggacgtgatcgatgccggcgtgcggctgttcaaagaggccaacgtggaaaacaacgagggcaggcggagcaagagaggcgccagaaggctgaagcggcggaggcggcatagaatccagagagtgaagaagctgctgttcgactacaacctgctgaccgaccacagcgagctgagcggcatcaacccctacgaggccagagtgaagggcctgagccagaagctgagcgaggaagagttctctgccgccctgctgcacctggccaagagaagaggcgtgcacaacgtgaacgaggtggaagaggacaccggcaacgagctgtccaccaaagagcagatcagccggaacagcaaggccctggaagagaaatacgtggccgaactgcagctggaacggctgaagaaagacggcgaagtgcggggcagcatcaacagattcaagaccagcgactacgtgaaagaagccaaacagctgctgaaggtgcagaaggcctaccaccagctggaccagagcttcatcgacacctacatcgacctgctggaaacccggcggacctactatgagggacctggcgagggcagccccttcggctggaaggacatcaaagaatggtacgagatgctgatgggccactgcacctacttccccgaggaactgcggagcgtgaagtacgcctacaacgccgacctgtacaacgccctgaacgacctgaacaatctcgtgatcaccagggacgagaacgagaagctggaatattacgagaagttccagatcatcgagaacgtgttcaagcagaagaagaagcccaccctgaagcagatcgccaaagaaatcctcgtgaacgaagaggatattaagggctacagagtgaccagcaccggcaagcccgagttcaccaacctgaaggtgtaccacgacatcaaggacattaccgcccggaaagagattattgagaacgccgagctgctggatcagattgccaagatcctgaccatctaccagagcagcgaggacatccaggaagaactgaccaatctgaactccgagctgacccaggaagagatcgagcagatctctaatctgaagggctataccggcacccacaacctgagcctgaaggccatcaacctgatcctggacgagctgtggcacaccaacgacaaccagatcgctatcttcaaccggctgaagctggtgcccaagaaggtggacctgtcccagcagaaagagatccccaccaccctggtggacgacttcatcctgagccccgtcgtgaagagaagcttcatccagagcatcaaagtgatcaacgccatcatcaagaagtacggcctgcccaacgacatcattatcgagctggcccgcgagaagaactccaaggacgcccagaaaatgatcaacgagatgcagaagcggaaccggcagaccaacgagcggatcgaggaaatcatccggaccaccggcaaagagaacgccaagtacctgatcgagaagatcaagctgcacgacatgcaggaaggcaagtgcctgtacagcctggaagccatccctctggaagatctgctgaacaaccccttcaactatgaggtggaccacatcatccccagaagcgtgtccttcgacaacagcttcaacaacaaggtgctcgtgaagcaggaagaagccagcaagaagggcaaccggaccccattccagtacctgagcagcagcgacagcaagatcagctacgaaaccttcaagaagcacatcctgaatctggccaagggcaagggcagaatcagcaagaccaagaaagagtatctgctggaagaacgggacatcaacaggttctccgtgcagaaagacttcatcaaccggaacctggtggataccagatacgccaccagaggcctgatgaacctgctgcggagctacttcagagtgaacaacctggacgtgaaagtgaagtccatcaatggcggcttcaccagctttctgcggcggaagtggaagtttaagaaagagcggaacaaggggtacaagcaccacgccgaggacgccctgatcattgccaacgccgatttcatcttcaaagagtggaagaaactggacaaggccaaaaaagtgatggaaaaccagatgttcgaggaaaagcaggccgagagcatgcccgagatcgaaaccgagcaggagtacaaagagatcttcatcaccccccaccagatcaagcacattaaggacttcaaggactacaagtacagccaccgggtggacaagaagcctaatagagagctgattaacgacaccctgtactccacccggaaggacgacaagggcaacaccctgatcgtgaacaatctgaacggcctgtacgacaaggacaatgacaagctgaaaaagctgatcaacaagagccccgaaaagctgctgatgtaccaccacgacccccagacctaccagaaactgaagctgattatggaacagtacggcgacgagaagaatcccctgtacaagtactacgaggaaaccgggaactacctgaccaagtactccaaaaaggacaacggccccgtgatcaagaagattaagtattacggcaacaaactgaacgcccatctggacatcaccgacgactaccccaacagcagaaacaaggtcgtgaagctgtccctgaagccctacagattcgacgtgtacctggacaatggcgtgtacaagttcgtgaccgtgaagaatctggatgtgatcaaaaaagaaaactactacgaagtgaatagcaagtgctatgaggaagctaagaagctgaagaagatcagcaaccaggccgagtttatcgcctccttctacaacaacgatctgatcaagatcaacggcgagctgtatagagtgatcggcgtgaacaacgacctgctgaaccggatcgaagtgaacatgatcgacatcacctaccgcgagtacctggaaaacatgaacgacaagaggccccccaggatcattaagacaatcgcctccaagacccagagcattaagaagtacagcacagacattctgggcaacctgtatgaagtgaaatctaagaagcaccctcagatcatcaaaaagggcaaaaggccggcggccacgaaaaaggccggccaggcaaaaaagaaaaagggatccggacgggctgacgcattggacgattttgatctggatatgctgggaagtgacgccctcgatgattttgaccttgacatgcttggttcggatgcccttgatgactttgacctcgacatgctcggcagtgacgcccttgatgatttcgacctggacatgctgattaactgtacaggcagtggagagggcagaggaagtctgctaacatgcggtgacgtcgaggagaatcctggcccaatggccaagcctttgtctcaagaagaatccaccctcattgaaagagcaacggctacaatcaacagcatccccatctctgaagactacagcgtcgccagcgcagctctctctagcgacggccgcatcttcactggtgtcaatgtatatcattttactgggggaccttgtgcagaactcgtggtgctgggcactgctgctgctgcggcagctggcaacctgacttgtatcgtcgcgatcggaaatgagaacaggggcatcttgagcccctgcggacggtgccgacaggtgcttctcgatctgcatcctgggatcaaagccatagtgaaggacagtgatggacagccgacggcagttgggattcgtgaattgctgccctctggttatgtgtgggagggctaagaattcctagagctcgctgatcagcctcgactgtgccttctagttgccagccatctgttgtttgcccctcccccgtgccttccttgaccctggaaggtgccactcccactgtcctttcctaataaaatgaggaaattgcatcgcattgtctgagtaggtgtcattctattctggggggtggggtggggcaggacagcaagggggaggattgggaagagaatagcaggcatgctggggaggtaccgagggcctatttcccatgattccttcatatttgcatatacgatacaaggctgttagagagataattggaattaatttgactgtaaacacaaagatattagtacaaaatacgtgacgtagaaagtaataatttcttgggtagtttgcagttttaaaattatgttttaaaatggactatcatatgcttaccgtaacttgaaagtatttcgatttcttggctttatatatcttgtggaaaggacgaaacaccggtaggggaactgcggagcgagttttagtactctggaaacagaatctactaaaacaaggcaaaatgccgtgtttatctcgtcaacttgttggcgagatttttgcggccgcaggaacccctagtgatggagttggccactccctctctgcgcgctcgctcgctcactgaggccgggcgaccaaaggtcgcccgacgcccgggctttgcccgggcggcctcagtgagcgagcgagcgcgcagctgcctgcaggggcgcctgatgcggtattttctccttacgcatctgtgcggtatttcacaccgcatacgtcaaagcaaccatagtacgcgccctgtagcggcgcattaagcgcggcgggtgtggtggttacgcgcagcgtgaccgctacacttgccagcgccttagcgcccgctcctttcgctttcttcccttcctttctcgccacgttcgccggctttccccgtcaagctctaaatcgggggctccctttagggttccgatttagtgctttacggcacctcgaccccaaaaaacttgatttgggtgatggttcacgtagtgggccatcgccctgatagacggtttttcgccctttgacgttggagtccacgttctttaatagtggactcttgttccaaactggaacaacactcaactctatctcgggctattcttttgatttataagggattttgccgatttcggtctattggttaaaaaatgagctgatttaacaaaaatttaacgcgaattttaacaaaatattaacgtttacaattttatggtgcactctcagtacaatctgctctgatgccgcatagttaagccagccccgacacccgccaacacccgctgacgcgccctgacgggcttgtctgctcccggcatccgcttacagacaagctgtgaccgtctccgggagctgcatgtgtcagaggttttcaccgtcatcaccgaaacgcgcgagacgaaagggcctcgtgatacgcctatttttataggttaatgtcatgataataatggtttcttagacgtcaggtggcacttttcggggaaatgtgcgcggaacccctatttgtttatttttctaaatacattcaaatatgtatccgctcatgagacaataaccctgataaatgcttcaataatattgaaaaaggaagagtatgagtattcaacatttccgtgtcgcccttattcccttttttgcggcattttgccttcctgtttttgctcacccagaaacgctggtgaaagtaaaagatgctgaagatcagttgggtgcacgagtgggttacatcgaactggatctcaacagcggtaagatccttgagagttttcgccccgaagaacgttttccaatgatgagcacttttaaagttctgctatgtggcgcggtattatcccgtattgacgccgggcaagagcaactcggtcgccgcatacactattctcagaatgacttggttgagtactcaccagtcacagaaaagcatcttacggatggcatgacagtaagagaattatgcagtgctgccataaccatgagtgataacactgcggccaacttacttctgacaacgatcggaggaccgaaggagctaaccgcttttttgcacaacatgggggatcatgtaactcgccttgatcgttgggaaccggagctgaatgaagccataccaaacgacgagcgtgacaccacgatgcctgtagcaatggcaacaacgttgcgcaaactattaactggcgaactacttactctagcttcccggcaacaattaatagactggatggaggcggataaagttgcaggaccacttctgcgctcggcccttccggctggctggtttattgctgataaatctggagccggtgagcgtggaagccgcggtatcattgcagcactggggccagatggtaagccctcccgtatcgtagttatctacacgacggggagtcaggcaactatggatgaacgaaatagacagatcgctgagataggtgcctcactgattaagcattggtaactgtcagaccaagtttactcatatatactttagattgatttaaaacttcatttttaatttaaaaggatctaggtgaagatcctttttgataatctcatgaccaaaatcccttaacgtgagttttcgttccactgagcgtcagaccccgtagaaaagatcaaaggatcttcttgagatcctttttttctgcgcgtaatctgctgcttgcaaacaaaaaaaccaccgctaccagcggtggtttgtttgccggatcaagagctaccaactctttttccgaaggtaactggcttcagcagagcgcagataccaaatactgttcttctagtgtagccgtagttaggccaccacttcaagaactctgtagcaccgcctacatacctcgctctgctaatcctgttaccagtggctgctgccagtggcgataagtcgtgtcttaccgggttggactcaagacgatagttaccggataaggcgcagcggtcgggctgaacggggggttcgtgcacacagcccagcttggagcgaacgacctacaccgaactgagatacctacagcgtgagctatgagaaagcgccacgcttcccgaagggagaaaggcggacaggtatccggtaagcggcagggtcggaacaggagagcgcacgagggagcttccagggggaaacgcctggtatctttatagtcctgtcgggtttcgccacctctgacttgagcgtcgatttttgtgatgctcgtcaggggggcggagcctatggaaaaacgccagcaacgcggcctttttacggttcctggccttttgctggccttttgctcacatgt

SEQ ID NO: 115 - RNA, 7997 nt, synthetic construct
  source 1..7997: mol_type = other RNA
cctgcaggcagctgcgcgctcgctcgctcactgaggccgcccgggcgtcgggcgacctttggtcgcccggcctcagtgagcgagcgagcgcgcagagagggagtggccaactccatcactaggggttcctgcggcctctagactcgaggcgttgacattgattattgactagttattaatagtaatcaattacggggtcattagttcatagcccatatatggagttccgcgttacataacttacggtaaatggcccgcctggctgaccgcccaacgacccccgcccattgacgtcaataatgacgtatgttcccatagtaacgccaatagggactttccattgacgtcaatgggtggagtatttacggtaaactgcccacttggcagtacatcaagtgtatcatatgccaagtacgccccctattgacgtcaatgacggtaaatggcccgcctggcattatgcccagtacatgaccttatgggactttcctacttggcagtacatctacgtattagtcatcgctattaccatggtgatgcggttttggcagtacatcaatgggcgtggatagcggtttgactcacggggatttccaagtctccaccccattgacgtcaatgggagtttgttttggcaccaaaatcaacgggactttccaaaatgtcgtaacaactccgccccattgacgcaaatgggcggtaggcgtgtacggtgggaggtctatataagcagagctctctggctaactaccggtgccaccatggccccaaagaagaagcggaaggtcggtatccacggagtcccagcagccaagcggaactacatcctgggcctggccatcggcatcaccagcgtgggctacggcatcatcgactacgagacacgggacgtgatcgatgccggcgtgcggctgttcaaagaggccaacgtggaaaacaacgagggcaggcggagcaagagaggcgccagaaggctgaagcggcggaggcggcatagaatccagagagtgaagaagctgctgttcgactacaacctgctgaccgaccacagcgagctgagcggcatcaacccctacgaggccagagtgaagggcctgagccagaagctgagcgaggaagagttctctgccgccctgctgcacctggccaagagaagaggcgtgcacaacgtgaacgaggtggaagaggacaccggcaacgagctgtccaccaaagagcagatcagccggaacagcaaggccctggaagagaaatacgtggccgaactgcagctggaacggctgaagaaagacggcgaagtgcggggcagcatcaacagattcaagaccagcgactacgtgaaagaagccaaacagctgctgaaggtgcagaaggcctaccaccagctggaccagagcttcatcgacacctacatcgacctgctggaaacccggcggacctactatgagggacctggcgagggcagccccttcggctggaaggacatcaaagaatggtacgagatgctgatgggccactgcacctacttccccgaggaactgcggagcgtgaagtacgcctacaacgccgacctgtacaacgccctgaacgacctgaacaatctcgtgatcaccagggacgagaacgagaagctggaatattacgagaagttccagatcatcgagaacgtgttcaagcagaagaagaagcccaccctgaagcagatcgccaaagaaatcctcgtgaacgaagaggatattaagggctacagagtgaccagcaccggcaagcccgagttcaccaacctgaaggtgtaccacgacatcaaggacattaccgcccggaaagagattattgagaacgccgagctgctggatcagattgccaagatcctgaccatctaccagagcagcgaggacatccaggaagaactgaccaatctgaactccgagctgacccaggaagagatcgagcagatctctaatctgaagggctataccggcacccacaacctgagcctgaaggccatcaacctgatcctggacgagctgtggcacaccaacgacaaccagatcgctatcttcaaccggctgaagctggtgcccaagaaggtggacctgtcccagcagaaagagatccccaccaccctggtggacgacttcatcctgagccccgtcgtgaagagaagcttcatccagagcatcaaagtgatcaacgccatcatcaagaagtacggcctgcccaacgacatcattatcgagctggcccgcgagaagaactccaaggacgcccagaaaatgatcaacgagatgcagaagcggaaccggcagaccaacgagcggatcgaggaaatcatccggaccaccggcaaagagaacgccaagtacctgatcgagaagatcaagctgcacgacatgcaggaaggcaagtgcctgtacagcctggaagccatccctctggaagatctgctgaacaaccccttcaactatgaggtggaccacatcatccccagaagcgtgtccttcgacaacagcttcaacaacaaggtgctcgtgaagcaggaagaagccagcaagaagggcaaccggaccccattccagtacctgagcagcagcgacagcaagatcagctacgaaaccttcaagaagcacatcctgaatctggccaagggcaagggcagaatcagcaagaccaagaaagagtatctgctggaagaacgggacatcaacaggttctccgtgcagaaagacttcatcaaccggaacctggtggataccagatacgccaccagaggcctgatgaacctgctgcggagctacttcagagtgaacaacctggacgtgaaagtgaagtccatcaatggcggcttcaccagctttctgcggcggaagtggaagtttaagaaagagcggaacaaggggtacaagcaccacgccgaggacgccctgatcattgccaacgccgatttcatcttcaaagagtggaagaaactggacaaggccaaaaaagtgatggaaaaccagatgttcgaggaaaagcaggccgagagcatgcccgagatcgaaaccgagcaggagtacaaagagatcttcatcaccccccaccagatcaagcacattaaggacttcaaggactacaagtacagccaccgggtggacaagaagcctaatagagagctgattaacgacaccctgtactccacccggaaggacgacaagggcaacaccctgatcgtgaacaatctgaacggcctgtacgacaaggacaatgacaagctgaaaaagctgatcaacaagagccccgaaaagctgctgatgtaccaccacgacccccagacctaccagaaactgaagctgattatggaacagtacggcgacgagaagaatcccctgtacaagtactacgaggaaaccgggaactacctgaccaagtactccaaaaaggacaacggccccgtgatcaagaagattaagtattacggcaacaaactgaacgcccatctggacatcaccgacgactaccccaacagcagaaacaaggtcgtgaagctgtccctgaagccctacagattcgacgtgtacctggacaatggcgtgtacaagttcgtgaccgtgaagaatctggatgtgatcaaaaaagaaaactactacgaagtgaatagcaagtgctatgaggaagctaagaagctgaagaagatcagcaaccaggccgagtttatcgcctccttctacaacaacgatctgatcaagatcaacggcgagctgtatagagtgatcggcgtgaacaacgacctgctgaaccggatcgaagtgaacatgatcgacatcacctaccgcgagtacctggaaaacatgaacgacaagaggccccccaggatcattaagacaatcgcctccaagacccagagcattaagaagtacagcacagacattctgggcaacctgtatgaagtgaaatctaagaagcaccctcagatcatcaaaaagggcaaaaggccggcggccacgaaaaaggccggccaggcaaaaaagaaaaagggatccggacgggctgacgcattggacgattttgatctggatatgctgggaagtgacgccctcgatgattttgaccttgacatgcttggttcggatgcccttgatgactttgacctcgacatgctcggcagtgacgcccttgatgatttcgacctggacatgctgattaactgtacaggcagtggagagggcagaggaagtctgctaacatgcggtgacgtcgaggagaatcctggcccaatggccaagcctttgtctcaagaagaatccaccctcattgaaagagcaacggctacaatcaacagcatccccatctctgaagactacagcgtcgccagcgcagctctctctagcgacggccgcatcttcactggtgtcaatgtatatcattttactgggggaccttgtgcagaactcgtggtgctgggcactgctgctgctgcggcagctggcaacctgacttgtatcgtcgcgatcggaaatgagaacaggggcatcttgagcccctgcggacggtgccgacaggtgcttctcgatctgcatcctgggatcaaagccatagtgaaggacagtgatggacagccgacggcagttgggattcgtgaattgctgccctctggttatgtgtgggagggctaagaattcctagagctcgctgatcagcctcgactgtgccttctagttgccagccatctgttgtttgcccctcccccgtgccttccttgaccctggaaggtgccactcccactgtcctttcctaataaaatgaggaaattgcatcgcattgtctgagtaggtgtcattctattctggggggtggggtggggcaggacagcaagggggaggattgggaagagaatagcaggcatgctggggaggtaccgagggcctatttcccatgattccttcatatttgcatatacgatacaaggctgttagagagataattggaattaatttgactgtaaacacaaagatattagtacaaaatacgtgacgtagaaagtaataatttcttgggtagtttgcagttttaaaattatgttttaaaatggactatcatatgcttaccgtaacttgaaagtatttcgatttcttggctttatatatcttgtggaaaggacgaaacaccgaaggacacaggtaggggaactgttttagtactctggaaacagaatctactaaaacaaggcaaaatgccgtgtttatctcgtcaacttgttggcgagatttttgcggccgcaggaacccctagtgatggagttggccactccctctctgcgcgctcgctcgctcactgaggccgggcgaccaaaggtcgcccgacgcccgggctttgcccgggcggcctcagtgagcgagcgagcgcgcagctgcctgcaggggcgcctgatgcggtattttctccttacgcatctgtgcggtatttcacaccgcatacgtcaaagcaaccatagtacgcgccctgtagcggcgcattaagcgcggcgggtgtggtggttacgcgcagcgtgaccgctacacttgccagcgccttagcgcccgctcctttcgctttcttcccttcctttctcgccacgttcgccggctttccccgtcaagctctaaatcgggggctccctttagggttccgatttagtgctttacggcacctcgaccccaaaaaacttgatttgggtgatggttcacgtagtgggccatcgccctgatagacggtttttcgccctttgacgttggagtccacgttctttaatagtggactcttgttccaaactggaacaacactcaactctatctcgggctattcttttgatttataagggattttgccgatttcggtctattggttaaaaaatgagctgatttaacaaaaatttaacgcgaattttaacaaaatattaacgtttacaattttatggtgcactctcagtacaatctgctctgatgccgcatagttaagccagccccgacacccgccaacacccgctgacgcgccctgacgggcttgtctgctcccggcatccgcttacagacaagctgtgaccgtctccgggagctgcatgtgtcagaggttttcaccgtcatcaccgaaacgcgcgagacgaaagggcctcgtgatacgcctatttttataggttaatgtcatgataataatggtttcttagacgtcaggtggcacttttcggggaaatgtgcgcggaacccctatttgtttatttttctaaatacattcaaatatgtatccgctcatgagacaataaccctgataaatgcttcaataatattgaaaaaggaagagtatgagtattcaacatttccgtgtcgcccttattcccttttttgcggcattttgccttcctgtttttgctcacccagaaacgctggtgaaagtaaaagatgctgaagatcagttgggtgcacgagtgggttacatcgaactggatctcaacagcggtaagatccttgagagttttcgccccgaagaacgttttccaatgatgagcacttttaaagttctgctatgtggcgcggtattatcccgtattgacgccgggcaagagcaactcggtcgccgcatacactattctcagaatgacttggttgagtactcaccagtcacagaaaagcatcttacggatggcatgacagtaagagaattatgcagtgctgccataaccatgagtgataacactgcggccaacttacttctgacaacgatcggaggaccgaaggagctaaccgcttttttgcacaacatgggggatcatgtaactcgccttgatcgttgggaaccggagctgaatgaagccataccaaacgacgagcgtgacaccacgatgcctgtagcaatggcaacaacgttgcgcaaactattaactggcgaactacttactctagcttcccggcaacaattaatagactggatggaggcggataaagttgcaggaccacttctgcgctcggcccttccggctggctggtttattgctgataaatctggagccggtgagcgtggaagccgcggtatcattgcagcactggggccagatggtaagccctcccgtatcgtagttatctacacgacggggagtcaggcaactatggatgaacgaaatagacagatcgctgagataggtgcctcactgattaagcattggtaactgtcagaccaagtttactcatatatactttagattgatttaaaacttcatttttaatttaaaaggatctaggtgaagatcctttttgataatctcatgaccaaaatcccttaacgtgagttttcgttccactgagcgtcagaccccgtagaaaagatcaaaggatcttcttgagatcctttttttctgcgcgtaatctgctgcttgcaaacaaaaaaaccaccgctaccagcggtggtttgtttgccggatcaagagctaccaactctttttccgaaggtaactggcttcagcagagcgcagataccaaatactgttcttctagtgtagccgtagttaggccaccacttcaagaactctgtagcaccgcctacatacctcgctctgctaatcctgttaccagtggctgctgccagtggcgataagtcgtgtcttaccgggttggactcaagacgatagttaccggataaggcgcagcggtcgggctgaacggggggttcgtgcacacagcccagcttggagcgaacgacctacaccgaactgagatacctacagcgtgagctatgagaaagcgccacgcttcccgaagggagaaaggcggacaggtatccggtaagcggcagggtcggaacaggagagcgcacgagggagcttccagggggaaacgcctggtatctttatagtcctgtcgggtttcgccacctctgacttgagcgtcgatttttgtgatgctcgtcaggggggcggagcctatggaaaaacgccagcaacgcggcctttttacggttcctggccttttgctggccttttgctcacatgt

SEQ ID NO: 116 - RNA, 7996 nt, synthetic construct
  source 1..7996: mol_type = other RNA
cctgcaggcagctgcgcgctcgctcgctcactgaggccgcccgggcgtcgggcgacctttggtcgcccggcctcagtgagcgagcgagcgcgcagagagggagtggccaactccatcactaggggttcctgcggcctctagactcgaggcgttgacattgattattgactagttattaatagtaatcaattacggggtcattagttcatagcccatatatggagttccgcgttacataacttacggtaaatggcccgcctggctgaccgcccaacgacccccgcccattgacgtcaataatgacgtatgttcccatagtaacgccaatagggactttccattgacgtcaatgggtggagtatttacggtaaactgcccacttggcagtacatcaagtgtatcatatgccaagtacgccccctattgacgtcaatgacggtaaatggcccgcctggcattatgcccagtacatgaccttatgggactttcctacttggcagtacatctacgtattagtcatcgctattaccatggtgatgcggttttggcagtacatcaatgggcgtggatagcggtttgactcacggggatttccaagtctccaccccattgacgtcaatgggagtttgttttggcaccaaaatcaacgggactttccaaaatgtcgtaacaactccgccccattgacgcaaatgggcggtaggcgtgtacggtgggaggtctatataagcagagctctctggctaactaccggtgccaccatggccccaaagaagaagcggaaggtcggtatccacggagtcccagcagccaagcggaactacatcctgggcctggccatcggcatcaccagcgtgggctacggcatcatcgactacgagacacgggacgtgatcgatgccggcgtgcggctgttcaaagaggccaacgtggaaaacaacgagggcaggcggagcaagagaggcgccagaaggctgaagcggcggaggcggcatagaatccagagagtgaagaagctgctgttcgactacaacctgctgaccgaccacagcgagctgagcggcatcaacccctacgaggccagagtgaagggcctgagccagaagctgagcgaggaagagttctctgccgccctgctgcacctggccaagagaagaggcgtgcacaacgtgaacgaggtggaagaggacaccggcaacgagctgtccaccaaagagcagatcagccggaacagcaaggccctggaagagaaatacgtggccgaactgcagctggaacggctgaagaaagacggcgaagtgcggggcagcatcaacagattcaagaccagcgactacgtgaaagaagccaaacagctgctgaaggtgcagaaggcctaccaccagctggaccagagcttcatcgacacctacatcgacctgctggaaacccggcggacctactatgagggacctggcgagggcagccccttcggctggaaggacatcaaagaatggtacgagatgctgatgggccactgcacctacttccccgaggaactgcggagcgtgaagtacgcctacaacgccgacctgtacaacgccctgaacgacctgaacaatctcgtgatcaccagggacgagaacgagaagctggaatattacgagaagttccagatcatcgagaacgtgttcaagcagaagaagaagcccaccctgaagcagatcgccaaagaaatcctcgtgaacgaagaggatattaagggctacagagtgaccagcaccggcaagcccgagttcaccaacctgaaggtgtaccacgacatcaaggacattaccgcccggaaagagattattgagaacgccgagctgctggatcagattgccaagatcctgaccatctaccagagcagcgaggacatccaggaagaactgaccaatctgaactccgagctgacccaggaagagatcgagcagatctctaatctgaagggctataccggcacccacaacctgagcctgaaggccatcaacctgatcctggacgagctgtggcacaccaacgacaaccagatcgctatcttcaaccggctgaagctggtgcccaagaaggtggacctgtcccagcagaaagagatccccaccaccctggtggacgacttcatcctgagccccgtcgtgaagagaagcttcatccagagcatcaaagtgatcaacgccatcatcaagaagtacggcctgcccaacgacatcattatcgagctggcccgcgagaagaactccaaggacgcccagaaaatgatcaacgagatgcagaagcggaaccggcagaccaacgagcggatcgaggaaatcatccggaccaccggcaaagagaacgccaagtacctgatcgagaagatcaagctgcacgacatgcaggaaggcaagtgcctgtacagcctggaagccatccctctggaagatctgctgaacaaccccttcaactatgaggtggaccacatcatccccagaagcgtgtccttcgacaacagcttcaacaacaaggtgctcgtgaagcaggaagaagccagcaagaagggcaaccggaccccattccagtacctgagcagcagcgacagcaagatcagctacgaaaccttcaagaagcacatcctgaatctggccaagggcaagggcagaatcagcaagaccaagaaagagtatctgctggaagaacgggacatcaacaggttctccgtgcagaaagacttcatcaaccggaacctggtggataccagatacgccaccagaggcctgatgaacctgctgcggagctacttcagagtgaacaacctggacgtgaaagtgaagtccatcaatggcggcttcaccagctttctgcggcggaagtggaagtttaagaaagagcggaacaaggggtacaagcaccacgccgaggacgccctgatcattgccaacgccgatttcatcttcaaagagtggaagaaactggacaaggccaaaaaagtgatggaaaaccagatgttcgaggaaaagcaggccgagagcatgcccgagatcgaaaccgagcaggagtacaaagagatcttcatcaccccccaccagatcaagcacattaaggacttcaaggactacaagtacagccaccgggtggacaagaagcctaatagagagctgattaacgacaccctgtactccacccggaaggacgacaagggcaacaccctgatcgtgaacaatctgaacggcctgtacgacaaggacaatgacaagctgaaaaagctgatcaacaagagccccgaaaagctgctgatgtaccaccacgacccccagacctaccagaaactgaagctgattatggaacagtacggcgacgagaagaatcccctgtacaagtactacgaggaaaccgggaactacctgaccaagtactccaaaaaggacaacggccccgtgatcaagaagattaagtattacggcaacaaactgaacgcccatctggacatcaccgacgactaccccaacagcagaaacaaggtcgtgaagctgtccctgaagccctacagattcgacgtgtacctggacaatggcgtgtacaagttcgtgaccgtgaagaatctggatgtgatcaaaaaagaaaactactacgaagtgaatagcaagtgctatgaggaagctaagaagctgaagaagatcagcaaccaggccgagtttatcgcctccttctacaacaacgatctgatcaagatcaacggcgagctgtatagagtgatcggcgtgaacaacgacctgctgaaccggatcgaagtgaacatgatcgacatcacctaccgcgagtacctggaaaacatgaacgacaagaggccccccaggatcattaagacaatcgcctccaagacccagagcattaagaagtacagcacagacattctgggcaacctgtatgaagtgaaatctaagaagcaccctcagatcatcaaaaagggcaaaaggccggcggccacgaaaaaggccggccaggcaaaaaagaaaaagggatccggacgggctgacgcattggacgattttgatctggatatgctgggaagtgacgccctcgatgattttgaccttgacatgcttggttcggatgcccttgatgactttgacctcgacatgctcggcagtgacgcccttgatgatttcgacctggacatgctgattaactgtacaggcagtggagagggcagaggaagtctgctaacatgcggtgacgtcgaggagaatcctggcccaatggccaagcctttgtctcaagaagaatccaccctcattgaaagagcaacggctacaatcaacagcatccccatctctgaagactacagcgtcgccagcgcagctctctctagcgacggccgcatcttcactggtgtcaatgtatatcattttactgggggaccttgtgcagaactcgtggtgctgggcactgctgctgctgcggcagctggcaacctgacttgtatcgtcgcgatcggaaatgagaacaggggcatcttgagcccctgcggacggtgccgacaggtgcttctcgatctgcatcctgggatcaaagccatagtgaaggacagtgatggacagccgacggcagttgggattcgtgaattgctgccctctggttatgtgtgggagggctaagaattcctagagctcgctgatcagcctcgactgtgccttctagttgccagccatctgttgtttgcccctcccccgtgccttccttgaccctggaaggtgccactcccactgtcctttcctaataaaatgaggaaattgcatcgcattgtctgagtaggtgtcattctattctggggggtggggtggggcaggacagcaagggggaggattgggaagagaatagcaggcatgctggggaggtaccgagggcctatttcccatgattccttcatatttgcatatacgatacaaggctgttagagagataattggaattaatttgactgtaaacacaaagatattagtacaaaatacgtgacgtagaaagtaataatttcttgggtagtttgcagttttaaaattatgttttaaaatggactatcatatgcttaccgtaacttgaaagtatttcgatttcttggctttatatatcttgtggaaaggacgaaacaccggaggaggatcggagatagaagttttagtactctggaaacagaatctactaaaacaaggcaaaatgccgtgtttatctcgtcaacttgttggcgagatttttgcggccgcaggaacccctagtgatggagttggccactccctctctgcgcgctcgctcgctcactgaggccgggcgaccaaaggtcgcccgacgcccgggctttgcccgggcggcctcagtgagcgagcgagcgcgcagctgcctgcaggggcgcctgatgcggtattttctccttacgcatctgtgcggtatttcacaccgcatacgtcaaagcaaccatagtacgcgccctgtagcggcgcattaagcgcggcgggtgtggtggttacgcgcagcgtgaccgctacacttgccagcgccttagcgcccgctcctttcgctttcttcccttcctttctcgccacgttcgccggctttccccgtcaagctctaaatcgggggctccctttagggttccgatttagtgctttacggcacctcgaccccaaaaaacttgatttgggtgatggttcacgtagtgggccatcgccctgatagacggtttttcgccctttgacgttggagtccacgttctttaatagtggactcttgttccaaactggaacaacactcaactctatctcgggctattcttttgatttataagggattttgccgatttcggtctattggttaaaaaatgagctgatttaacaaaaatttaacgcgaattttaacaaaatattaacgtttacaattttatggtgcactctcagtacaatctgctctgatgccgcatagttaagccagccccgacacccgccaacacccgctgacgcgccctgacgggcttgtctgctcccggcatccgcttacagacaagctgtgaccgtctccgggagctgcatgtgtcagaggttttcaccgtcatcaccgaaacgcgcgagacgaaagggcctcgtgatacgcctatttttataggttaatgtcatgataataatggtttcttagacgtcaggtggcacttttcggggaaatgtgcgcggaacccctatttgtttatttttctaaatacattcaaatatgtatccgctcatgagacaataaccctgataaatgcttcaataatattgaaaaaggaagagtatgagtattcaacatttccgtgtcgcccttattcccttttttgcggcattttgccttcctgtttttgctcacccagaaacgctggtgaaagtaaaagatgctgaagatcagttgggtgcacgagtgggttacatcgaactggatctcaacagcggtaagatccttgagagttttcgccccgaagaacgttttccaatgatgagcacttttaaagttctgctatgtggcgcggtattatcccgtattgacgccgggcaagagcaactcggtcgccgcatacactattctcagaatgacttggttgagtactcaccagtcacagaaaagcatcttacggatggcatgacagtaagagaattatgcagtgctgccataaccatgagtgataacactgcggccaacttacttctgacaacgatcggaggaccgaaggagctaaccgcttttttgcacaacatgggggatcatgtaactcgccttgatcgttgggaaccggagctgaatgaagccataccaaacgacgagcgtgacaccacgatgcctgtagcaatggcaacaacgttgcgcaaactattaactggcgaactacttactctagcttcccggcaacaattaatagactggatggaggcggataaagttgcaggaccacttctgcgctcggcccttccggctggctggtttattgctgataaatctggagccggtgagcgtggaagccgcggtatcattgcagcactggggccagatggtaagccctcccgtatcgtagttatctacacgacggggagtcaggcaactatggatgaacgaaatagacagatcgctgagataggtgcctcactgattaagcattggtaactgtcagaccaagtttactcatatatactttagattgatttaaaacttcatttttaatttaaaaggatctaggtgaagatcctttttgataatctcatgaccaaaatcccttaacgtgagttttcgttccactgagcgtcagaccccgtagaaaagatcaaaggatcttcttgagatcctttttttctgcgcgtaatctgctgcttgcaaacaaaaaaaccaccgctaccagcggtggtttgtttgccggatcaagagctaccaactctttttccgaaggtaactggcttcagcagagcgcagataccaaatactgttcttctagtgtagccgtagttaggccaccacttcaagaactctgtagcaccgcctacatacctcgctctgctaatcctgttaccagtggctgctgccagtggcgataagtcgtgtcttaccgggttggactcaagacgatagttaccggataaggcgcagcggtcgggctgaacggggggttcgtgcacacagcccagcttggagcgaacgacctacaccgaactgagatacctacagcgtgagctatgagaaagcgccacgcttcccgaagggagaaaggcggacaggtatccggtaagcggcagggtcggaacaggagagcgcacgagggagcttccagggggaaacgcctggtatctttatagtcctgtcgggtttcgccacctctgacttgagcgtcgatttttgtgatgctcgtcaggggggcggagcctatggaaaaacgccagcaacgcggcctttttacggttcctggccttttgctggccttttgctcacatgt

SEQ ID NO: 117 - RNA, 21 nt, synthetic construct
  source 1..21: mol_type = other RNA
tcctcctcctgatggcggttc

SEQ ID NO: 118 - RNA, 21 nt, synthetic construct
  source 1..21: mol_type = other RNA
gccccgggaaccgccatcagg

SEQ ID NO: 119 - RNA, 21 nt, synthetic construct
  source 1..21: mol_type = other RNA
cagagccagggtccgcgggtg

SEQ ID NO: 120 - RNA, 7996 nt, synthetic construct
  source 1..7996: mol_type = other RNA
cctgcaggcagctgcgcgctcgctcgctcactgaggccgcccgggcgtcgggcgacctttggtcgcccggcctcagtgagcgagcgagcgcgcagagagggagtggccaactccatcactaggggttcctgcggcctctagactcgaggcgttgacattgattattgactagttattaatagtaatcaattacggggtcattagttcatagcccatatatggagttccgcgttacataacttacggtaaatggcccgcctggctgaccgcccaacgacccccgcccattgacgtcaataatgacgtatgttcccatagtaacgccaatagggactttccattgacgtcaatgggtggagtatttacggtaaactgcccacttggcagtacatcaagtgtatcatatgccaagtacgccccctattgacgtcaatgacggtaaatggcccgcctggcattatgcccagtacatgaccttatgggactttcctacttggcagtacatctacgtattagtcatcgctattaccatggtgatgcggttttggcagtacatcaatgggcgtggatagcggtttgactcacggggatttccaagtctccaccccattgacgtcaatgggagtttgttttggcaccaaaatcaacgggactttccaaaatgtcgtaacaactccgccccattgacgcaaatgggcggtaggcgtgtacggtgggaggtctatataagcagagctctctggctaactaccggtgccaccatggccccaaagaagaagcggaaggtcggtatccacggagtcccagcagccaagcggaactacatcctgggcctggccatcggcatcaccagcgtgggctacggcatcatcgactacgagacacgggacgtgatcgatgccggcgtgcggctgttcaaagaggccaacgtggaaaacaacgagggcaggcggagcaagagaggcgccagaaggctgaagcggcggaggcggcatagaatccagagagtgaagaagctgctgttcgactacaacctgctgaccgaccacagcgagctgagcggcatcaacccctacgaggccagagtgaagggcctgagccagaagctgagcgaggaagagttctctgccgccctgctgcacctggccaagagaagaggcgtgcacaacgtgaacgaggtggaagaggacaccggcaacgagctgtccaccaaagagcagatcagccggaacagcaaggccctggaagagaaatacgtggccgaactgcagctggaacggctgaagaaagacggcgaagtgcggggcagcatcaacagattcaagaccagcgactacgtgaaagaagccaaacagctgctgaaggtgcagaaggcctaccaccagctggaccagagcttcatcgacacctacatcgacctgctggaaacccggcggacctactatgagggacctggcgagggcagccccttcggctggaaggacatcaaagaatggtacgagatgctgatgggccactgcacctacttccccgaggaactgcggagcgtgaagtacgcctacaacgccgacctgtacaacgccctgaacgacctgaacaatctcgtgatcaccagggacgagaacgagaagctggaatattacgagaagttccagatcatcgagaacgtgttcaagcagaagaagaagcccaccctgaagcagatcgccaaagaaatcctcgtgaacgaagaggatattaagggctacagagtgaccagcaccggcaagcccgagttcaccaacctgaaggtgtaccacgacatcaaggacattaccgcccggaaagagattattgagaacgccgagctgctggatcagattgccaagatcctgaccatctaccagagcagcgaggacatccaggaagaactgaccaatctgaactccgagctgacccaggaagagatcgagcagatctctaatctgaagggctataccggcacccacaacctgagcctgaaggccatcaacctgatcctggacgagctgtggcacaccaacgacaaccagatcgctatcttcaaccggctgaagctggtgcccaagaaggtggacctgtcccagcagaaagagatccccaccaccctggtggacgacttcatcctgagccccgtcgtgaagagaagcttcatccagagcatcaaagtgatcaacgccatcatcaagaagtacggcctgcccaacgacatcattatcgagctggcccgcgagaagaactccaaggacgcccagaaaatgatcaacgagatgcagaagcggaaccggcagaccaacgagcggatcgaggaaatcatccggaccaccggcaaagagaacgccaagtacctgatcgagaagatcaagctgcacgacatgcaggaaggcaagtgcctgtacagcctggaagccatccctctggaagatctgctgaacaaccccttcaactatgaggtggaccacatcatccccagaagcgtgtccttcgacaacagcttcaacaacaaggtgctcgtgaagcaggaagaagccagcaagaagggcaaccggaccccattccagtacctgagcagcagcgacagcaagatcagctacgaaaccttcaagaagcacatcctgaatctggccaagggcaagggcagaatcagcaagaccaagaaagagtatctgctggaagaacgggacatcaacaggttctccgtgcagaaagacttcatcaaccggaacctggtggataccagatacgccaccagaggcctgatgaacctgctgcggagctacttcagagtgaacaacctggacgtgaaagtgaagtccatcaatggcggcttcaccagctttctgcggcggaagtggaagtttaagaaagagcggaacaaggggtacaagcaccacgccgaggacgccctgatcattgccaacgccgatttcatcttcaaagagtggaagaaactggacaaggccaaaaaagtgatggaaaaccagatgttcgaggaaaagcaggccgagagcatgcccgagatcgaaaccgagcaggagtacaaagagatcttcatcaccccccaccagatcaagcacattaaggacttcaaggactacaagtacagccaccgggtggacaagaagcctaatagagagctgattaacgacaccctgtactccacccggaaggacgacaagggcaacaccctgatcgtgaacaatctgaacggcctgtacgacaaggacaatgacaagctgaaaaagctgatcaacaagagccccgaaaagctgctgatgtaccaccacgacccccagacctaccagaaactgaagctgattatggaacagtacggcgacgagaagaatcccctgtacaagtactacgaggaaaccgggaactacctgaccaagtactccaaaaaggacaacggccccgtgatcaagaagattaagtattacggcaacaaactgaacgcccatctggacatcaccgacgactaccccaacagcagaaacaaggtcgtgaagctgtccctgaagccctacagattcgacgtgtacctggacaatggcgtgtacaagttcgtgaccgtgaagaatctggatgtgatcaaaaaagaaaactactacgaagtgaatagcaagtgctatgaggaagctaagaagctgaagaagatcagcaaccaggccgagtttatcgcctccttctacaacaacgatctgatcaagatcaacggcgagctgtatagagtgatcggcgtgaacaacgacctgctgaaccggatcgaagtgaacatgatcgacatcacctaccgcgagtacctggaaaacatgaacgacaagaggccccccaggatcattaagacaatcgcctccaagacccagagcattaagaagtacagcacagacattctgggcaacctgtatgaagtgaaatctaagaagcaccctcagatcatcaaaaagggcaaaaggccggcggccacgaaaaaggccggccaggcaaaaaagaaaaagggatccggacgggctgacgcattggacgattttgatctggatatgctgggaagtgacgccctcgatgattttgaccttgacatgcttggttcggatgcccttgatgactttgacctcgacatgctcggcagtgacgcccttgatgatttcgacctggacatgctgattaactgtacaggcagtggagagggcagaggaagtctgctaacatgcggtgacgtcgaggagaatcctggcccaatggccaagcctttgtctcaagaagaatccaccctcattgaaagagcaacggctacaatcaacagcatccccatctctgaagactacagcgtcgccagcgcagctctctctagcgacggccgcatcttcactggtgtcaatgtatatcattttactgggggaccttgtgcagaactcgtggtgctgggcactgctgctgctgcggcagctggcaacctgacttgtatcgtcgcgatcggaaatgagaacaggggcatcttgagcccctgcggacggtgccgacaggtgcttctcgatctgcatcctgggatcaaagccatagtgaaggacagtgatggacagccgacggcagttgggattcgtgaattgctgccctctggttatgtgtgggagggctaagaattcctagagctcgctgatcagcctcgactgtgccttctagttgccagccatctgttgtttgcccctcccccgtgccttccttgaccctggaaggtgccactcccactgtcctttcctaataaaatgaggaaattgcatcgcattgtctgagtaggtgtcattctattctggggggtggggtggggcaggacagcaagggggaggattgggaagagaatagcaggcatgctggggaggtaccgagggcctatttcccatgattccttcatatttgcatatacgatacaaggctgttagagagataattggaattaatttgactgtaaacacaaagatattagtacaaaatacgtgacgtagaaagtaataatttcttgggtagtttgcagttttaaaattatgttttaaaatggactatcatatgcttaccgtaacttgaaagtatttcgatttcttggctttatatatcttgtggaaaggacgaaacacctcctcctcctgatggcggttcgttttagtactctggaaacagaatctactaaaacaaggcaaaatgccgtgtttatctcgtcaacttgttggcgagatttttgcggccgcaggaacccctagtgatggagttggccactccctctctgcgcgctcgctcgctcactgaggccgggcgaccaaaggtcgcccgacgcccgggctttgcccgggcggcctcagtgagcgagcgagcgcgcagctgcctgcaggggcgcctgatgcggtattttctccttacgcatctgtgcggtatttcacaccgcatacgtcaaagcaaccatagtacgcgccctgtagcggcgcattaagcgcggcgggtgtggtggttacgcgcagcgtgaccgctacacttgccagcgccttagcgcccgctcctttcgctttcttcccttcctttctcgccacgttcgccggctttccccgtcaagctctaaatcgggggctccctttagggttccgatttagtgctttacggcacctcgaccccaaaaaacttgatttgggtgatggttcacgtagtgggccatcgccctgatagacggtttttcgccctttgacgttggagtccacgttctttaatagtggactcttgttccaaactggaacaacactcaactctatctcgggctattcttttgatttataagggattttgccgatttcggtctattggttaaaaaatgagctgatttaacaaaaatttaacgcgaattttaacaaaatattaacgtttacaattttatggtgcactctcagtacaatctgctctgatgccgcatagttaagccagccccgacacccgccaacacccgctgacgcgccctgacgggcttgtctgctcccggcatccgcttacagacaagctgtgaccgtctccgggagctgcatgtgtcagaggttttcaccgtcatcaccgaaacgcgcgagacgaaagggcctcgtgatacgcctatttttataggttaatgtcatgataataatggtttcttagacgtcaggtggcacttttcggggaaatgtgcgcggaacccctatttgtttatttttctaaatacattcaaatatgtatccgctcatgagacaataaccctgataaatgcttcaataatattgaaaaaggaagagtatgagtattcaacatttccgtgtcgcccttattcccttttttgcggcattttgccttcctgtttttgctcacccagaaacgctggtgaaagtaaaagatgctgaagatcagttgggtgcacgagtgggttacatcgaactggatctcaacagcggtaagatccttgagagttttcgccccgaagaacgttttccaatgatgagcacttttaaagttctgctatgtggcgcggtattatcccgtattgacgccgggcaagagcaactcggtcgccgcatacactattctcagaatgacttggttgagtactcaccagtcacagaaaagcatcttacggatggcatgacagtaagagaattatgcagtgctgccataaccatgagtgataacactgcggccaacttacttctgacaacgatcggaggaccgaaggagctaaccgcttttttgcacaacatgggggatcatgtaactcgccttgatcgttgggaaccggagctgaatgaagccataccaaacgacgagcgtgacaccacgatgcctgtagcaatggcaacaacgttgcgcaaactattaactggcgaactacttactctagcttcccggcaacaattaatagactggatggaggcggataaagttgcaggaccacttctgcgctcggcccttccggctggctggtttattgctgataaatctggagccggtgagcgtggaagccgcggtatcattgcagcactggggccagatggtaagccctcccgtatcgtagttatctacacgacggggagtcaggcaactatggatgaacgaaatagacagatcgctgagataggtgcctcactgattaagcattggtaactgtcagaccaagtttactcatatatactttagattgatttaaaacttcatttttaatttaaaaggatctaggtgaagatcctttttgataatctcatgaccaaaatcccttaacgtgagttttcgttccactgagcgtcagaccccgtagaaaagatcaaaggatcttcttgagatcctttttttctgcgcgtaatctgctgcttgcaaacaaaaaaaccaccgctaccagcggtggtttgtttgccggatcaagagctaccaactctttttccgaaggtaactggcttcagcagagcgcagataccaaatactgttcttctagtgtagccgtagttaggccaccacttcaagaactctgtagcaccgcctacatacctcgctctgctaatcctgttaccagtggctgctgccagtggcgataagtcgtgtcttaccgggttggactcaagacgatagttaccggataaggcgcagcggtcgggctgaacggggggttcgtgcacacagcccagcttggagcgaacgacctacaccgaactgagatacctacagcgtgagctatgagaaagcgccacgcttcccgaagggagaaaggcggacaggtatccggtaagcggcagggtcggaacaggagagcgcacgagggagcttccagggggaaacgcctggtatctttatagtcctgtcgggtttcgccacctctgacttgagcgtcgatttttgtgatgctcgtcaggggggcggagcctatggaaaaacgccagcaacgcggcctttttacggttcctggccttttgctggccttttgctcacatgt

SEQ ID NO: 121 - RNA, 7996 nt, synthetic construct
  source 1..7996: mol_type = other RNA
cctgcaggcagctgcgcgctcgctcgctcactgaggccgcccgggcgtcgggcgacctttggtcgcccggcctcagtgagcgagcgagcgcgcagagagggagtggccaactccatcactaggggttcctgcggcctctagactcgaggcgttgacattgattattgactagttattaatagtaatcaattacggggtcattagttcatagcccatatatggagttccgcgttacataacttacggtaaatggcccgcctggctgaccgcccaacgacccccgcccattgacgtcaataatgacgtatgttcccatagtaacgccaatagggactttccattgacgtcaatgggtggagtatttacggtaaactgcccacttggcagtacatcaagtgtatcatatgccaagtacgccccctattgacgtcaatgacggtaaatggcccgcctggcattatgcccagtacatgaccttatgggactttcctacttggcagtacatctacgtattagtcatcgctattaccatggtgatgcggttttggcagtacatcaatgggcgtggatagcggtttgactcacggggatttccaagtctccaccccattgacgtcaatgggagtttgttttggcaccaaaatcaacgggactttccaaaatgtcgtaacaactccgccccattgacgcaaatgggcggtaggcgtgtacggtgggaggtctatataagcagagctctctggctaactaccggtgccaccatggccccaaagaagaagcggaaggtcggtatccacggagtcccagcagccaagcggaactacatcctgggcctggccatcggcatcaccagcgtgggctacggcatcatcgactacgagacacgggacgtgatcgatgccggcgtgcggctgttcaaagaggccaacgtggaaaacaacgagggcaggcggagcaagagaggcgccagaaggctgaagcggcggaggcggcatagaatccagagagtgaagaagctgctgttcgactacaacctgctgaccgaccacagcgagctgagcggcatcaacccctacgaggccagagtgaagggcctgagccagaagctgagcgaggaagagttctctgccgccctgctgcacctggccaagagaagaggcgtgcacaacgtgaacgaggtggaagaggacaccggcaacgagctgtccaccaaagagcagatcagccggaacagcaaggccctggaagagaaatacgtggccgaactgcagctggaacggctgaagaaagacggcgaagtgcggggcagcatcaacagattcaagaccagcgactacgtgaaagaagccaaacagctgctgaaggtgcagaaggcctaccaccagctggaccagagcttcatcgacacctacatcgacctgctggaaacccggcggacctactatgagggacctggcgagggcagccccttcggctggaaggacatcaaagaatggtacgagatgctgatgggccactgcacctacttccccgaggaactgcggagcgtgaagtacgcctacaacgccgacctgtacaacgccctgaacgacctgaacaatctcgtgatcaccagggacgagaacgagaagctggaatattacgagaagttccagatcatcgagaacgtgttcaagcagaagaagaagcccaccctgaagcagatcgccaaagaaatcctcgtgaacgaagaggatattaagggctacagagtgaccagcaccggcaagcccgagttcaccaacctgaaggtgtaccacgacatcaaggacattaccgcccggaaagagattattgagaacgccgagctgctggatcagattgccaagatcctgaccatctaccagagcagcgaggacatccaggaagaactgaccaatctgaactccgagctgacccaggaagagatcgagcagatctctaatctgaagggctataccggcacccacaacctgagcctgaaggccatcaacctgatcctggacgagctgtggcacaccaacgacaaccagatcgctatcttcaaccggctgaagctggtgcccaagaaggtggacctgtcccagcagaaagagatccccaccaccctggtggacgacttcatcctgagccccgtcgtgaagagaagcttcatccagagcatcaaagtgatcaacgccatcatcaagaagtacggcctgcccaacgacatcattatcgagctggcccgcgagaagaactccaaggacgcccagaaaatgatcaacgagatgcagaagcggaaccggcagaccaacgagcggatcgaggaaatcatccggaccaccggcaaagagaacgccaagtacctgatcgagaagatcaagctgcacgacatgcaggaaggcaagtgcctgtacagcctggaagccatccctctggaagatctgctgaacaaccccttcaactatgaggtggaccacatcatccccagaagcgtgtccttcgacaacagcttcaacaacaaggtgctcgtgaagcaggaagaagccagcaagaagggcaaccggaccccattccagtacctgagcagcagcgacagcaagatcagctacgaaaccttcaagaagcacatcctgaatctggccaagggcaagggcagaatcagcaagaccaagaaagagtatctgctggaagaacgggacatcaacaggttctccgtgcagaaagacttcatcaaccggaacctggtggataccagatacgccaccagaggcctgatgaacctgctgcggagctacttcagagtgaacaacctggacgtgaaagtgaagtccatcaatggcggcttcaccagctttctgcggcggaagtggaagtttaagaaagagcggaacaaggggtacaagcaccacgccgaggacgccctgatcattgccaacgccgatttcatcttcaaagagtggaagaaactggacaaggccaaaaaagtgatggaaaaccagatgttcgaggaaaagcaggccgagagcatgcccgagatcgaaaccgagcaggagtacaaagagatcttcatcaccccccaccagatcaagcacattaaggacttcaaggactacaagtacagccaccgggtggacaagaagcctaatagagagctgattaacgacaccctgtactccacccggaaggacgacaagggcaacaccctgatcgtgaacaatctgaacggcctgtacgacaaggacaatgacaagctgaaaaagctgatcaacaagagccccgaaaagctgctgatgtaccaccacgacccccagacctaccagaaactgaagctgattatggaacagtacggcgacgagaagaatcccctgtacaagtactacgaggaaaccgggaactacctgaccaagtactccaaaaaggacaacggccccgtgatcaagaagattaagtattacggcaacaaactgaacgcccatctggacatcaccgacgactaccccaacagcagaaacaaggtcgtgaagctgtccctgaagccctacagattcgacgtgtacctggacaatggcgtgtacaagttcgtgaccgtgaagaatctggatgtgatcaaaaaagaaaactactacgaagtgaatagcaagtgctatgaggaagctaagaagctgaagaagatcagcaaccaggccgagtttatcgcctccttctacaacaacgatctgatcaagatcaacggcgagctgtatagagtgatcggcgtgaacaacgacctgctgaaccggatcgaagtgaacatgatcgacatcacctaccgcgagtacctggaaaacatgaacgacaagaggccccccaggatcattaagacaatcgcctccaagacccagagcattaagaagtacagcacagacattctgggcaacctgtatgaagtgaaatctaagaagcaccctcagatcatcaaaaagggcaaaaggccggcggccacgaaaaaggccggccaggcaaaaaagaaaaagggatccggacgggctgacgcattggacgattttgatctggatatgctgggaagtgacgccctcgatgattttgaccttgacatgcttggttcggatgcccttgatgactttgacctcgacatgctcggcagtgacgcccttgatgatttcgacctggacatgctgattaactgtacaggcagtggagagggcagaggaagtctgctaacatgcggtgacgtcgaggagaatcctggcccaatggccaagcctttgtctcaagaagaatccaccctcattgaaagagcaacggctacaatcaacagcatccccatctctgaagactacagcgtcgccagcgcagctctctctagcgacggccgcatcttcactggtgtcaatgtatatcattttactgggggaccttgtgcagaactcgtggtgctgggcactgctgctgctgcggcagctggcaacctgacttgtatcgtcgcgatcggaaatgagaacaggggcatcttgagcccctgcggacggtgccgacaggtgcttctcgatctgcatcctgggatcaaagccatagtgaaggacagtgatggacagccgacggcagttgggattcgtgaattgctgccctctggttatgtgtgggagggctaagaattcctagagctcgctgatcagcctcgactgtgccttctagttgccagccatctgttgtttgcccctcccccgtgccttccttgaccctggaaggtgccactcccactgtcctttcctaataaaatgaggaaattgcatcgcattgtctgagtaggtgtcattctattctggggggtggggtggggcaggacagcaagggggaggattgggaagagaatagcaggcatgctggggaggtaccgagggcctatttcccatgattccttcatatttgcatatacgatacaaggctgttagagagataattggaattaatttgactgtaaacacaaagatattagtacaaaatacgtgacgtagaaagtaataatttcttgggtagtttgcagttttaaaattatgttttaaaatggactatcatatgcttaccgtaacttgaaagtatttcgatttcttggctttatatatcttgtggaaaggacgaaacaccgccccgggaaccgccatcagggttttagtactctggaaacagaatctactaaaacaaggcaaaatgccgtgtttatctcgtcaacttgttggcgagatttttgcggccgcaggaacccctagtgatggagttggccactccctctctgcgcgctcgctcgctcactgaggccgggcgaccaaaggtcgcccgacgcccgggctttgcccgggcggcctcagtgagcgagcgagcgcgcagctgcctgcaggggcgcctgatgcggtattttctccttacgcatctgtgcggtatttcacaccgcatacgtcaaagcaaccatagtacgcgccctgtagcggcgcattaagcgcggcgggtgtggtggttacgcgcagcgtgaccgctacacttgccagcgccttagcgcccgctcctttcgctttcttcccttcctttctcgccacgttcgccggctttccccgtcaagctctaaatcgggggctccctttagggttccgatttagtgctttacggcacctcgaccccaaaaaacttgatttgggtgatggttcacgtagtgggccatcgccctgatagacggtttttcgccctttgacgttggagtccacgttctttaatagtggactcttgttccaaactggaacaacactcaactctatctcgggctattcttttgatttataagggattttgccgatttcggtctattggttaaaaaatgagctgatttaacaaaaatttaacgcgaattttaacaaaatattaacgtttacaattttatggtgcactctcagtacaatctgctctgatgccgcatagttaagccagccccgacacccgccaacacccgctgacgcgccctgacgggcttgtctgctcccggcatccgcttacagacaagctgtgaccgtctccgggagctgcatgtgtcagaggttttcaccgtcatcaccgaaacgcgcgagacgaaagggcctcgtgatacgcctatttttataggttaatgtcatgataataatggtttcttagacgtcaggtggcacttttcggggaaatgtgcgcggaacccctatttgtttatttttctaaatacattcaaatatgtatccgctcatgagacaataaccctgataaatgcttcaataatattgaaaaaggaagagtatgagtattcaacatttccgtgtcgcccttattcccttttttgcggcattttgccttcctgtttttgctcacccagaaacgctggtgaaagtaaaagatgctgaagatcagttgggtgcacgagtgggttacatcgaactggatctcaacagcggtaagatccttgagagttttcgccccgaagaacgttttccaatgatgagcacttttaaagttctgctatgtggcgcggtattatcccgtattgacgccgggcaagagcaactcggtcgccgcatacactattctcagaatgacttggttgagtactcaccagtcacagaaaagcatcttacggatggcatgacagtaagagaattatgcagtgctgccataaccatgagtgataacactgcggccaacttacttctgacaacgatcggaggaccgaaggagctaaccgcttttttgcacaacatgggggatcatgtaactcgccttgatcgttgggaaccggagctgaatgaagccataccaaacgacgagcgtgacaccacgatgcctgtagcaatggcaacaacgttgcgcaaactattaactggcgaactacttactctagcttcccggcaacaattaatagactggatggaggcggataaagttgcaggaccacttctgcgctcggcccttccggctggctggtttattgctgataaatctggagccggtgagcgtggaagccgcggtatcattgcagcactggggccagatggtaagccctcccgtatcgtagttatctacacgacggggagtcaggcaactatggatgaacgaaatagacagatcgctgagataggtgcctcactgattaagcattggtaactgtcagaccaagtttactcatatatactttagattgatttaaaacttcatttttaatttaaaaggatctaggtgaagatcctttttgataatctcatgaccaaaatcccttaacgtgagttttcgttccactgagcgtcagaccccgtagaaaagatcaaaggatcttcttgagatcctttttttctgcgcgtaatctgctgcttgcaaacaaaaaaaccaccgctaccagcggtggtttgtttgccggatcaagagctaccaactctttttccgaaggtaactggcttcagcagagcgcagataccaaatactgttcttctagtgtagccgtagttaggccaccacttcaagaactctgtagcaccgcctacatacctcgctctgctaatcctgttaccagtggctgctgccagtggcgataagtcgtgtcttaccgggttggactcaagacgatagttaccggataaggcgcagcggtcgggctgaacggggggttcgtgcacacagcccagcttggagcgaacgacctacaccgaactgagatacctacagcgtgagctatgagaaagcgccacgcttcccgaagggagaaaggcggacaggtatccggtaagcggcagggtcggaacaggagagcgcacgagggagcttccagggggaaacgcctggtatctttatagtcctgtcgggtttcgccacctctgacttgagcgtcgatttttgtgatgctcgtcaggggggcggagcctatggaaaaacgccagcaacgcggcctttttacggttcctggccttttgctggccttttgctcacatgt

SEQ ID NO: 122 - RNA, 7996 nt, synthetic construct
  source 1..7996: mol_type = other RNA
cctgcaggcagctgcgcgctcgctcgctcactgaggccgcccgggcgtcgggcgacctttggtcgcccggcctcagtgagcgagcgagcgcgcagagagggagtggccaactccatcactaggggttcctgcggcctctagactcgaggcgttgacattgattattgactagttattaatagtaatcaattacggggtcattagttcatagcccatatatggagttccgcgttacataacttacggtaaatggcccgcctggctgaccgcccaacgacccccgcccattgacgtcaataatgacgtatgttcccatagtaacgccaatagggactttccattgacgtcaatgggtggagtatttacggtaaactgcccacttggcagtacatcaagtgtatcatatgccaagtacgccccctattgacgtcaatgacggtaaatggcccgcctggcattatgcccagtacatgaccttatgggactttcctacttggcagtacatctacgtattagtcatcgctattaccatggtgatgcggttttggcagtacatcaatgggcgtggatagcggtttgactcacggggatttccaagtctccaccccattgacgtcaatgggagtttgttttggcaccaaaatcaacgggactttccaaaatgtcgtaacaactccgccccattgacgcaaatgggcggtaggcgtgtacggtgggaggtctatataagcagagctctctggctaactaccggtgccaccatggccccaaagaagaagcggaaggtcggtatccacggagtcccagcagccaagcggaactacatcctgggcctggccatcggcatcaccagcgtgggctacggcatcatcgactacgagacacgggacgtgatcgatgccggcgtgcggctgttcaaagaggccaacgtggaaaacaacgagggcaggcggagcaagagaggcgccagaaggctgaagcggcggaggcggcatagaatccagagagtgaagaagctgctgttcgactacaacctgctgaccgaccacagcgagctgagcggcatcaacccctacgaggccagagtgaagggcctgagccagaagctgagcgaggaagagttctctgccgccctgctgcacctggccaagagaagaggcgtgcacaacgtgaacgaggtggaagaggacaccggcaacgagctgtccaccaaagagcagatcagccggaacagcaaggccctggaagagaaatacgtggccgaactgcagctggaacggctgaagaaagacggcgaagtgcggggcagcatcaacagattcaagaccagcgactacgtgaaagaagccaaacagctgctgaaggtgcagaaggcctaccaccagctggaccagagcttcatcgacacctacatcgacctgctggaaacccggcggacctactatgagggacctggcgagggcagccccttcggctggaaggacatcaaagaatggtacgagatgctgatgggccactgcacctacttccccgaggaactgcggagcgtgaagtacgcctacaacgccgacctgtacaacgccctgaacgacctgaacaatctcgtgatcaccagggacgagaacgagaagctggaatattacgagaagttccagatcatcgagaacgtgttcaagcagaagaagaagcccaccctgaagcagatcgccaaagaaatcctcgtgaacgaagaggatattaagggctacagagtgaccagcaccggcaagcccgagttcaccaacctgaaggtgtaccacgacatcaaggacattaccgcccggaaagagattattgagaacgccgagctgctggatcagattgccaagatcctgaccatctaccagagcagcgaggacatccaggaagaactgaccaatctgaactccgagctgacccaggaagagatcgagcagatctctaatctgaagggctataccggcacccacaacctgagcctgaaggccatcaacctgatcctggacgagctgtggcacaccaacgacaaccagatcgctatcttcaaccggctgaagctggtgcccaagaaggtggacctgtcccagcagaaagagatccccaccaccctggtggacgacttcatcctgagccccgtcgtgaagagaagcttcatccagagcatcaaagtgatcaacgccatcatcaagaagtacggcctgcccaacgacatcattatcgagctggcccgcgagaagaactccaaggacgcccagaaaatgatcaacgagatgcagaagcggaaccggcagaccaacgagcggatcgaggaaatcatccggaccaccggcaaagagaacgccaagtacctgatcgagaagatcaagctgcacgacatgcaggaaggcaagtgcctgtacagcctggaagccatccctctggaagatctgctgaacaaccccttcaactatgaggtggaccacatcatccccagaagcgtgtccttcgacaacagcttcaacaacaaggtgctcgtgaagcaggaagaagccagcaagaagggcaaccggaccccattccagtacctgagcagcagcgacagcaagatcagctacgaaaccttcaagaagcacatcctgaatctggccaagggcaagggcagaatcagcaagaccaagaaagagtatctgctggaagaacgggacatcaacaggttctccgtgcagaaagacttcatcaaccggaacctggtggataccagatacgccaccagaggcctgatgaacctgctgcggagctacttcagagtgaacaacctggacgtgaaagtgaagtccatcaatggcggcttcaccagctttctgcggcggaagtggaagtttaagaaagagcggaacaaggggtacaagcaccacgccgaggacgccctgatcattgccaacgccgatttcatcttcaaagagtggaagaaactggacaaggccaaaaaagtgatggaaaaccagatgttcgaggaaaagcaggccgagagcatgcccgagatcgaaaccgagcaggagtacaaagagatcttcatcaccccccaccagatcaagcacattaaggacttcaaggactacaagtacagccaccgggtggacaagaagcctaatagagagctgattaacgacaccctgtactccacccggaaggacgacaagggcaacaccctgatcgtgaacaatctgaacggcctgtacgacaaggacaatgacaagctgaaaaagctgatcaacaagagccccgaaaagctgctgatgtaccaccacgacccccagacctaccagaaactgaagctgattatggaacagtacggcgacgagaagaatcccctgtacaagtactacgaggaaaccgggaactacctgaccaagtactccaaaaaggacaacggccccgtgatcaagaagattaagtattacggcaacaaactgaacgcccatctggacatcaccgacgactaccccaacagcagaaacaaggtcgtgaagctgtccctgaagccctacagattcgacgtgtacctggacaatggcgtgtacaagttcgtgaccgtgaagaatctggatgtgatcaaaaaagaaaactactacgaagtgaatagcaagtgctatgaggaagctaagaagctgaagaagatcagcaaccaggccgagtttatcgcctccttctacaacaacgatctgatcaagatcaacggcgagctgtatagagtgatcggcgtgaacaacgacctgctgaaccggatcgaagtgaacatgatcgacatcacctaccgcgagtacctggaaaacatgaacgacaagaggccccccaggatcattaagacaatcgcctccaagacccagagcattaagaagtacagcacagacattctgggcaacctgtatgaagtgaaatctaagaagcaccctcagatcatcaaaaagggcaaaaggccggcggccacgaaaaaggccggccaggcaaaaaagaaaaagggatccggacgggctgacgcattggacgattttgatctggatatgctgggaagtgacgccctcgatgattttgaccttgacatgcttggttcggatgcccttgatgactttgacctcgacatgctcggcagtgacgcccttgatgatttcgacctggacatgctgattaactgtacaggcagtggagagggcagaggaagtctgctaacatgcggtgacgtcgaggagaatcctggcccaatggccaagcctttgtctcaagaagaatccaccctcattgaaagagcaacggctacaatcaacagcatccccatctctgaagactacagcgtcgccagcgcagctctctctagcgacggccgcatcttcactggtgtcaatgtatatcattttactgggggaccttgtgcagaactcgtggtgctgggcactgctgctgctgcggcagctggcaacctgacttgtatcgtcgcgatcggaaatgagaacaggggcatcttgagcccctgcggacggtgccgacaggtgcttctcgatctgcatcctgggatcaaagccatagtgaaggacagtgatggacagccgacggcagttgggattcgtgaattgctgccctctggttatgtgtgggagggctaagaattcctagagctcgctgatcagcctcgactgtgccttctagttgccagccatctgttgtttgcccctcccccgtgccttccttgaccctggaaggtgccactcccactgtcctttcctaataaaatgaggaaattgcatcgcattgtctgagtaggtgtcattctattctggggggtggggtggggcaggacagcaagggggaggattgggaagagaatagcaggcatgctggggaggtaccgagggcctatttcccatgattccttcatatttgcatatacgatacaaggctgttagagagataattggaattaatttgactgtaaacacaaagatattagtacaaaatacgtgacgtagaaagtaataatttcttgggtagtttgcagttttaaaattatgttttaaaatggactatcatatgcttaccgtaacttgaaagtatttcgatttcttggctttatatatcttgtggaaaggacgaaacacccagagccagggtccgcgggtggttttagtactctggaaacagaatctactaaaacaaggcaaaatgccgtgtttatctcgtcaacttgttggcgagatttttgcggccgcaggaacccctagtgatggagttggccactccctctctgcgcgctcgctcgctcactgaggccgggcgaccaaaggtcgcccgacgcccgggctttgcccgggcggcctcagtgagcgagcgagcgcgcagctgcctgcaggggcgcctgatgcggtattttctccttacgcatctgtgcggtatttcacaccgcatacgtcaaagcaaccatagtacgcgccctgtagcggcgcattaagcgcggcgggtgtggtggttacgcgcagcgtgaccgctacacttgccagcgccttagcgcccgctcctttcgctttcttcccttcctttctcgccacgttcgccggctttccccgtcaagctctaaatcgggggctccctttagggttccgatttagtgctttacggcacctcgaccccaaaaaacttgatttgggtgatggttcacgtagtgggccatcgccctgatagacggtttttcgccctttgacgttggagtccacgttctttaatagtggactcttgttccaaactggaacaacactcaactctatctcgggctattcttttgatttataagggattttgccgatttcggtctattggttaaaaaatgagctgatttaacaaaaatttaacgcgaattttaacaaaatattaacgtttacaattttatggtgcactctcagtacaatctgctctgatgccgcatagttaagccagccccgacacccgccaacacccgctgacgcgccctgacgggcttgtctgctcccggcatccgcttacagacaagctgtgaccgtctccgggagctgcatgtgtcagaggttttcaccgtcatcaccgaaacgcgcgagacgaaagggcctcgtgatacgcctatttttataggttaatgtcatgataataatggtttcttagacgtcaggtggcacttttcggggaaatgtgcgcggaacccctatttgtttatttttctaaatacattcaaatatgtatccgctcatgagacaataaccctgataaatgcttcaataatattgaaaaaggaagagtatgagtattcaacatttccgtgtcgcccttattcccttttttgcggcattttgccttcctgtttttgctcacccagaaacgctggtgaaagtaaaagatgctgaagatcagttgggtgcacgagtgggttacatcgaactggatctcaacagcggtaagatccttgagagttttcgccccgaagaacgttttccaatgatgagcacttttaaagttctgctatgtggcgcggtattatcccgtattgacgccgggcaagagcaactcggtcgccgcatacactattctcagaatgacttggttgagtactcaccagtcacagaaaagcatcttacggatggcatgacagtaagagaattatgcagtgctgccataaccatgagtgataacactgcggccaacttacttctgacaacgatcggaggaccgaaggagctaaccgcttttttgcacaacatgggggatcatgtaactcgccttgatcgttgggaaccggagctgaatgaagccataccaaacgacgagcgtgacaccacgatgcctgtagcaatggcaacaacgttgcgcaaactattaactggcgaactacttactctagcttcccggcaacaattaatagactggatggaggcggataaagttgcaggaccacttctgcgctcggcccttccggctggctggtttattgctgataaatctggagccggtgagcgtggaagccgcggtatcattgcagcactggggccagatggtaagccctcccgtatcgtagttatctacacgacggggagtcaggcaactatggatgaacgaaatagacagatcgctgagataggtgcctcactgattaagcattggtaactgtcagaccaagtttactcatatatactttagattgatttaaaacttcatttttaatttaaaaggatctaggtgaagatcctttttgataatctcatgaccaaaatcccttaacgtgagttttcgttccactgagcgtcagaccccgtagaaaagatcaaaggatcttcttgagatcctttttttctgcgcgtaatctgctgcttgcaaacaaaaaaaccaccgctaccagcggtggtttgtttgccggatcaagagctaccaactctttttccgaaggtaactggcttcagcagagcgcagataccaaatactgttcttctagtgtagccgtagttaggccaccacttcaagaactctgtagcaccgcctacatacctcgctctgctaatcctgttaccagtggctgctgccagtggcgataagtcgtgtcttaccgggttggactcaagacgatagttaccggataaggcgcagcggtcgggctgaacggggggttcgtgcacacagcccagcttggagcgaacgacctacaccgaactgagatacctacagcgtgagctatgagaaagcgccacgcttcccgaagggagaaaggcggacaggtatccggtaagcggcagggtcggaacaggagagcgcacgagggagcttccagggggaaacgcctggtatctttatagtcctgtcgggtttcgccacctctgacttgagcgtcgatttttgtgatgctcgtcaggggggcggagcctatggaaaaacgccagcaacgcggcctttttacggttcctggccttttgctggccttttgctcacatgt

SEQ ID NO: 123 - RNA, 6882 nt, synthetic construct
  source 1..6882: mol_type = other RNA
  misc_feature 543..544: note = Adenine is connected to Guanine through the promoter sequence of shCaMKII
cctgcaggcagctgcgcgctcgctcgctcactgaggccgcccgggcaaagcccgggcgtcgggcgacctttggtcgcccggcctcagtgagcgagcgagcgcgcagagagggagtggccaactccatcactaggggttcctgcggccgcacgcgtggtaccgagggcctatttcccatgattccttcatatttgcatatacgatacaaggctgttagagagataattggaattaatttgactgtaaacacaaagatattagtacaaaatacgtgacgtagaaagtaataatttcttgggtagtttgcagttttaaaattatgttttaaaatggactatcatatgcttaccgtaacttgaaagtatttcgatttcttggctttatatatcttgtggaaaggacgaaacaccgtgcgaatacgcccacgcgatgtttttagtactctggaaacagaatctactaaaacaaggcaaaatgccgtgtttatctcgtcaacttgttggcgagatttttgcgacgcgtaattccacggggttaatcgaagatatcgaattcggtaccaccggtgccaccatggccccaaagaagaagcggaaggtcggtatccacggagtcccagcagccaagcggaactacatcctgggcctggccatcggcatcaccagcgtgggctacggcatcatcgactacgagacacgggacgtgatcgatgccggcgtgcggctgttcaaagaggccaacgtggaaaacaacgagggcaggcggagcaagagaggcgccagaaggctgaagcggcggaggcggcatagaatccagagagtgaagaagctgctgttcgactacaacctgctgaccgaccacagcgagctgagcggcatcaacccctacgaggccagagtgaagggcctgagccagaagctgagcgaggaagagttctctgccgccctgctgcacctggccaagagaagaggcgtgcacaacgtgaacgaggtggaagaggacaccggcaacgagctgtccaccaaagagcagatcagccggaacagcaaggccctggaagagaaatacgtggccgaactgcagctggaacggctgaagaaagacggcgaagtgcggggcagcatcaacagattcaagaccagcgactacgtgaaagaagccaaacagctgctgaaggtgcagaaggcctaccaccagctggaccagagcttcatcgacacctacatcgacctgctggaaacccggcggacctactatgagggacctggcgagggcagccccttcggctggaaggacatcaaagaatggtacgagatgctgatgggccactgcacctacttccccgaggaactgcggagcgtgaagtacgcctacaacgccgacctgtacaacgccctgaacgacctgaacaatctcgtgatcaccagggacgagaacgagaagctggaatattacgagaagttccagatcatcgagaacgtgttcaagcagaagaagaagcccaccctgaagcagatcgccaaagaaatcctcgtgaacgaagaggatattaagggctacagagtgaccagcaccggcaagcccgagttcaccaacctgaaggtgtaccacgacatcaaggacattaccgcccggaaagagattattgagaacgccgagctgctggatcagattgccaagatcctgaccatctaccagagcagcgaggacatccaggaagaactgaccaatctgaactccgagctgacccaggaagagatcgagcagatctctaatctgaagggctataccggcacccacaacctgagcctgaaggccatcaacctgatcctggacgagctgtggcacaccaacgacaaccagatcgctatcttcaaccggctgaagctggtgcccaagaaggtggacctgtcccagcagaaagagatccccaccaccctggtggacgacttcatcctgagccccgtcgtgaagagaagcttcatccagagcatcaaagtgatcaacgccatcatcaagaagtacggcctgcccaacgacatcattatcgagctggcccgcgagaagaactccaaggacgcccagaaaatgatcaacgagatgcagaagcggaaccggcagaccaacgagcggatcgaggaaatcatccggaccaccggcaaagagaacgccaagtacctgatcgagaagatcaagctgcacgacatgcaggaaggcaagtgcctgtacagcctggaagccatccctctggaagatctgctgaacaaccccttcaactatgaggtggaccacatcatccccagaagcgtgtccttcgacaacagcttcaacaacaaggtgctcgtgaagcaggaagaagccagcaagaagggcaaccggaccccattccagtacctgagcagcagcgacagcaagatcagctacgaaaccttcaagaagcacatcctgaatctggccaagggcaagggcagaatcagcaagaccaagaaagagtatctgctggaagaacgggacatcaacaggttctccgtgcagaaagacttcatcaaccggaacctggtggataccagatacgccaccagaggcctgatgaacctgctgcggagctacttcagagtgaacaacctggacgtgaaagtgaagtccatcaatggcggcttcaccagctttctgcggcggaagtggaagtttaagaaagagcggaacaaggggtacaagcaccacgccgaggacgccctgatcattgccaacgccgatttcatcttcaaagagtggaagaaactggacaaggccaaaaaagtgatggaaaaccagatgttcgaggaaaagcaggccgagagcatgcccgagatcgaaaccgagcaggagtacaaagagatcttcatcaccccccaccagatcaagcacattaaggacttcaaggactacaagtacagccaccgggtggacaagaagcctaatagagagctgattaacgacaccctgtactccacccggaaggacgacaagggcaacaccctgatcgtgaacaatctgaacggcctgtacgacaaggacaatgacaagctgaaaaagctgatcaacaagagccccgaaaagctgctgatgtaccaccacgacccccagacctaccagaaactgaagctgattatggaacagtacggcgacgagaagaatcccctgtacaagtactacgaggaaaccgggaactacctgaccaagtactccaaaaaggacaacggccccgtgatcaagaagattaagtattacggcaacaaactgaacgcccatctggacatcaccgacgactaccccaacagcagaaacaaggtcgtgaagctgtccctgaagccctacagattcgacgtgtacctggacaatggcgtgtacaagttcgtgaccgtgaagaatctggatgtgatcaaaaaagaaaactactacgaagtgaatagcaagtgctatgaggaagctaagaagctgaagaagatcagcaaccaggccgagtttatcgcctccttctacaacaacgatctgatcaagatcaacggcgagctgtatagagtgatcggcgtgaacaacgacctgctgaaccggatcgaagtgaacatgatcgacatcacctaccgcgagtacctggaaaacatgaacgacaagaggccccccaggatcattaagacaatcgcctccaagacccagagcattaagaagtacagcacagacattctgggcaacctgtatgaagtgaaatctaagaagcaccctcagatcatcaaaaagggcaaaaggccggcggccacgaaaaaggccggccaggcaaaaaagaaaaagggatccgaggccagcggttccggacgggctgacgcattggacgattttgatctggatatgctgggaagtgacgccctcgatgattttgaccttgacatgcttggttcggatgcccttgatgactttgacctcgacatgctcggcagtgacgcccttgatgatttcgacctggacatgctgattaactcaagatgatctagacatatggatatctgactagtctcgagtttattgcagcttataatggttacaaataaagcaatagcatcacaaatttcacaaataaagcatttttttcactggaccgagcggccgcaggaacccctagtgatggagttggccactccctctctgcgcgctcgctcgctcactgaggccgggcgaccaaaggtcgcccgacgcccgggctttgcccgggcggcctcagtgagcgagcgagcgcgcagctgcctgcaggggcgcctgatgcggtattttctccttacgcatctgtgcggtatttcacaccgcatacgtcaaagcaaccatagtacgcgccctgtagcggcgcattaagcgcggcgggtgtggtggttacgcgcagcgtgaccgctacacttgccagcgccctagcgcccgctcctttcgctttcttcccttcctttctcgccacgttcgccggctttccccgtcaagctctaaatcgggggctccctttagggttccgatttagtgctttacggcacctcgaccccaaaaaacttgatttgggtgatggttcacgtagtgggccatcgccctgatagacggtttttcgccctttgacgttggagtccacgttctttaatagtggactcttgttccaaactggaacaacactcaaccctatctcgggctattcttttgatttataagggattttgccgatttcggcctattggttaaaaaatgagctgatttaacaaaaatttaacgcgaattttaacaaaatattaacgtttacaattttatggtgcactctcagtacaatctgctctgatgccgcatagttaagccagccccgacacccgccaacacccgctgacgcgccctgacgggcttgtctgctcccggcatccgcttacagacaagctgtgaccgtctccgggagctgcatgtgtcagaggttttcaccgtcatcaccgaaacgcgcgagacgaaagggcctcgtgatacgcctatttttataggttaatgtcatgataataatggtttcttagacgtcaggtggcacttttcggggaaatgtgcgcggaacccctatttgtttatttttctaaatacattcaaatatgtatccgctcatgagacaataaccctgataaatgcttcaataatattgaaaaaggaagagtatgagtattcaacatttccgtgtcgcccttattcccttttttgcggcattttgccttcctgtttttgctcacccagaaacgctggtgaaagtaaaagatgctgaagatcagttgggtgcacgagtgggttacatcgaactggatctcaacagcggtaagatccttgagagttttcgccccgaagaacgttttccaatgatgagcacttttaaagttctgctatgtggcgcggtattatcccgtattgacgccgggcaagagcaactcggtcgccgcatacactattctcagaatgacttggttgagtactcaccagtcacagaaaagcatcttacggatggcatgacagtaagagaattatgcagtgctgccataaccatgagtgataacactgcggccaacttacttctgacaacgatcggaggaccgaaggagctaaccgcttttttgcacaacatgggggatcatgtaactcgccttgatcgttgggaaccggagctgaatgaagccataccaaacgacgagcgtgacaccacgatgcctgtagcaatggcaacaacgttgcgcaaactattaactggcgaactacttactctagcttcccggcaacaattaatagactggatggaggcggataaagttgcaggaccacttctgcgctcggcccttccggctggctggtttattgctgataaatctggagccggtgagcgtgggtctcgcggtatcattgcagcactggggccagatggtaagccctcccgtatcgtagttatctacacgacggggagtcaggcaactatggatgaacgaaatagacagatcgctgagataggtgcctcactgattaagcattggtaactgtcagaccaagtttactcatatatactttagattgatttaaaacttcatttttaatttaaaaggatctaggtgaagatcctttttgataatctcatgaccaaaatcccttaacgtgagttttcgttccactgagcgtcagaccccgtagaaaagatcaaaggatcttcttgagatcctttttttctgcgcgtaatctgctgcttgcaaacaaaaaaaccaccgctaccagcggtggtttgtttgccggatcaagagctaccaactctttttccgaaggtaactggcttcagcagagcgcagataccaaatactgtccttctagtgtagccgtagttaggccaccacttcaagaactctgtagcaccgcctacatacctcgctctgctaatcctgttaccagtggctgctgccagtggcgataagtcgtgtcttaccgggttggactcaagacgatagttaccggataaggcgcagcggtcgggctgaacggggggttcgtgcacacagcccagcttggagcgaacgacctacaccgaactgagatacctacagcgtgagctatgagaaagcgccacgcttcccgaagggagaaaggcggacaggtatccggtaagcggcagggtcggaacaggagagcgcacgagggagcttccagggggaaacgcctggtatctttatagtcctgtcgggtttcgccacctctgacttgagcgtcgatttttgtgatgctcgtcaggggggcggagcctatggaaaaacgccagcaacgcggcctttttacggttcctggccttttgctggccttttgctcacatgt

SEQ ID NO: 124 - RNA, 6881 nt, synthetic construct
  source 1..6881: mol_type = other RNA
  misc_feature 542..543: note = Adenine is connected to Guanine through the promoter sequence of shCaMKII
cctgcaggcagctgcgcgctcgctcgctcactgaggccgcccgggcaaagcccgggcgtcgggcgacctttggtcgcccggcctcagtgagcgagcgagcgcgcagagagggagtggccaactccatcactaggggttcctgcggccgcacgcgtggtaccgagggcctatttcccatgattccttcatatttgcatatacgatacaaggctgttagagagataattggaattaatttgactgtaaacacaaagatattagtacaaaatacgtgacgtagaaagtaataatttcttgggtagtttgcagttttaaaattatgttttaaaatggactatcatatgcttaccgtaacttgaaagtatttcgatttcttggctttatatatcttgtggaaaggacgaaacaccgccccagccggcccctttaatgttttagtactctggaaacagaatctactaaaacaaggcaaaatgccgtgtttatctcgtcaacttgttggcgagatttttgcgacgcgtaattccacggggttaatcgaagatatcgaattcggtaccaccggtgccaccatggccccaaagaagaagcggaaggtcggtatccacggagtcccagcagccaagcggaactacatcctgggcctggccatcggcatcaccagcgtgggctacggcatcatcgactacgagacacgggacgtgatcgatgccggcgtgcggctgttcaaagaggccaacgtggaaaacaacgagggcaggcggagcaagagaggcgccagaaggctgaagcggcggaggcggcatagaatccagagagtgaagaagctgctgttcgactacaacctgctgaccgaccacagcgagctgagcggcatcaacccctacgaggccagagtgaagggcctgagccagaagctgagcgaggaagagttctctgccgccctgctgcacctggccaagagaagaggcgtgcacaacgtgaacgaggtggaagaggacaccggcaacgagctgtccaccaaagagcagatcagccggaacagcaaggccctggaagagaaatacgtggccgaactgcagctggaacggctgaagaaagacggcgaagtgcggggcagcatcaacagattcaagaccagcgactacgtgaaagaagccaaacagctgctgaaggtgcagaaggcctaccaccagctggaccagagcttcatcgacacctacatcgacctgctggaaacccggcggacctactatgagggacctggcgagggcagccccttcggctggaaggacatcaaagaatggtacgagatgctgatgggccactgcacctacttccccgaggaactgcggagcgtgaagtacgcctacaacgccgacctgtacaacgccctgaacgacctgaacaatctcgtgatcaccagggacgagaacgagaagctggaatattacgagaagttccagatcatcgagaacgtgttcaagcagaagaagaagcccaccctgaagcagatcgccaaagaaatcctcgtgaacgaagaggatattaagggctacagagtgaccagcaccggcaagcccgagttcaccaacctgaaggtgtaccacgacatcaaggacattaccgcccggaaagagattattgagaacgccgagctgctggatcagattgccaagatcctgaccatctaccagagcagcgaggacatccaggaagaactgaccaatctgaactccgagctgacccaggaagagatcgagcagatctctaatctgaagggctataccggcacccacaacctgagcctgaaggccatcaacctgatcctggacgagctgtggcacaccaacgacaaccagatcgctatcttcaaccggctgaagctggtgcccaagaaggtggacctgtcccagcagaaagagatccccaccaccctggtggacgacttcatcctgagccccgtcgtgaagagaagcttcatccagagcatcaaagtgatcaacgccatcatcaagaagtacggcctgcccaacgacatcattatcgagctggcccgcgagaagaactccaaggacgcccagaaaatgatcaacgagatgcagaagcggaaccggcagaccaacgagcggatcgaggaaatcatccggaccaccggcaaagagaacgccaagtacctgatcgagaagatcaagctgcacgacatgcaggaaggcaagtgcctgtacagcctggaagccatccctctggaagatctgctgaacaaccccttcaactatgaggtggaccacatcatccccagaagcgtgtccttcgacaacagcttcaacaacaaggtgctcgtgaagcaggaagaagccagcaagaagggcaaccggaccccattccagtacctgagcagcagcgacagcaagatcagctacgaaaccttcaagaagcacatcctgaatctggccaagggcaagggcagaatcagcaagaccaagaaagagtatctgctggaagaacgggacatcaacaggttctccgtgcagaaagacttcatcaaccggaacctggtggataccagatacgccaccagaggcctgatgaacctgctgcggagctacttcagagtgaacaacctggacgtgaaagtgaagtccatcaatggcggcttcaccagctttctgcggcggaagtggaagtttaagaaagagcggaacaaggggtacaagcaccacgccgaggacgccctgatcattgccaacgccgatttcatcttcaaagagtggaagaaactggacaaggccaaaaaagtgatggaaaaccagatgttcgaggaaaagcaggccgagagcatgcccgagatcgaaaccgagcaggagtacaaagagatcttcatcaccccccaccagatcaagcacattaaggacttcaaggactacaagtacagccaccgggtggacaagaagcctaatagagagctgattaacgacaccctgtactccacccggaaggacgacaagggcaacaccctgatcgtgaacaatctgaacggcctgtacgacaaggacaatgacaagctgaaaaagctgatcaacaagagccccgaaaagctgctgatgtaccaccacgacccccagacctaccagaaactgaagctgattatggaacagtacggcgacgagaagaatcccctgtacaagtactacgaggaaaccgggaactacctgaccaagtactccaaaaaggacaacggccccgtgatcaagaagattaagtattacggcaacaaactgaacgcccatctggacatcaccgacgactaccccaacagcagaaacaaggtcgtgaagctgtccctgaagccctacagattcgacgtgtacctggacaatggcgtgtacaagttcgtgaccgtgaagaatctggatgtgatcaaaaaagaaaactactacgaagtgaatagcaagtgctatgaggaagctaagaagctgaagaagatcagcaaccaggccgagtttatcgcctccttctacaacaacgatctgatcaagatcaacggcgagctgtatagagtgatcggcgtgaacaacgacctgctgaaccggatcgaagtgaacatgatcgacatcacctaccgcgagtacctggaaaacatgaacgacaagaggccccccaggatcattaagacaatcgcctccaagacccagagcattaagaagtacagcacagacattctgggcaacctgtatgaagtgaaatctaagaagcaccctcagatcatcaaaaagggcaaaaggccggcggccacgaaaaaggccggccaggcaaaaaagaaaaagggatccgaggccagcggttccggacgggctgacgcattggacgattttgatctggatatgctgggaagtgacgccctcgatgattttgaccttgacatgcttggttcggatgcccttgatgactttgacctcgacatgctcggcagtgacgcccttgatgatttcgacctggacatgctgattaactcaagatgatctagacatatggatatctgactagtctcgagtttattgcagcttataatggttacaaataaagcaatagcatcacaaatttcacaaataaagcatttttttcactggaccgagcggccgcaggaacccctagtgatggagttggccactccctctctgcgcgctcgctcgctcactgaggccgggcgaccaaaggtcgcccgacgcccgggctttgcccgggcggcctcagtgagcgagcgagcgcgcagctgcctgcaggggcgcctgatgcggtattttctccttacgcatctgtgcggtatttcacaccgcatacgtcaaagcaaccatagtacgcgccctgtagcggcgcattaagcgcggcgggtgtggtggttacgcgcagcgtgaccgctacacttgccagcgccctagcgcccgctcctttcgctttcttcccttcctttctcgccacgttcgccggctttccccgtcaagctctaaatcgggggctccctttagggttccgatttagtgctttacggcacctcgaccccaaaaaacttgatttgggtgatggttcacgtagtgggccatcgccctgatagacggtttttcgccctttgacgttggagtccacgttctttaatagtggactcttgttccaaactggaacaacactcaaccctatctcgggctattcttttgatttataagggattttgccgatttcggcctattggttaaaaaatgagctgatttaacaaaaatttaacgcgaattttaacaaaatattaacgtttacaattttatggtgcactctcagtacaatctgctctgatgccgcatagttaagccagccccgacacccgccaacacccgctgacgcgccctgacgggcttgtctgctcccggcatccgcttacagacaagctgtgaccgtctccgggagctgcatgtgtcagaggttttcaccgtcatcaccgaaacgcgcgagacgaaagggcctcgtgatacgcctatttttataggttaatgtcatgataataatggtttcttagacgtcaggtggcacttttcggggaaatgtgcgcggaacccctatttgtttatttttctaaatacattcaaatatgtatccgctcatgagacaataaccctgataaatgcttcaataatattgaaaaaggaagagtatgagtattcaacatttccgtgtcgcccttattcccttttttgcggcattttgccttcctgtttttgctcacccagaaacgctggtgaaagtaaaagatgctgaagatcagttgggtgcacgagtgggttacatcgaactggatctcaacagcggtaagatccttgagagttttcgccccgaagaacgttttccaatgatgagcacttttaaagttctgctatgtggcgcggtattatcccgtattgacgccgggcaagagcaactcggtcgccgcatacactattctcagaatgacttggttgagtactcaccagtcacagaaaagcatcttacggatggcatgacagtaagagaattatgcagtgctgccataaccatgagtgataacactgcggccaacttacttctgacaacgatcggaggaccgaaggagctaaccgcttttttgcacaacatgggggatcatgtaactcgccttgatcgttgggaaccggagctgaatgaagccataccaaacgacgagcgtgacaccacgatgcctgtagcaatggcaacaacgttgcgcaaactattaactggcgaactacttactctagcttcccggcaacaattaatagactggatggaggcggataaagttgcaggaccacttctgcgctcggcccttccggctggctggtttattgctgataaatctggagccggtgagcgtgggtctcgcggtatcattgcagcactggggccagatggtaagccctcccgtatcgtagttatctacacgacggggagtcaggcaactatggatgaacgaaatagacagatcgctgagataggtgcctcactgattaagcattggtaactgtcagaccaagtttactcatatatactttagattgatttaaaacttcatttttaatttaaaaggatctaggtgaagatcctttttgataatctcatgaccaaaatcccttaacgtgagttttcgttccactgagcgtcagaccccgtagaaaagatcaaaggatcttcttgagatcctttttttctgcgcgtaatctgctgcttgcaaacaaaaaaaccaccgctaccagcggtggtttgtttgccggatcaagagctaccaactctttttccgaaggtaactggcttcagcagagcgcagataccaaatactgtccttctagtgtagccgtagttaggccaccacttcaagaactctgtagcaccgcctacatacctcgctctgctaatcctgttaccagtggctgctgccagtggcgataagtcgtgtcttaccgggttggactcaagacgatagttaccggataaggcgcagcggtcgggctgaacggggggttcgtgcacacagcccagcttggagcgaacgacctacaccgaactgagatacctacagcgtgagctatgagaaagcgccacgcttcccgaagggagaaaggcggacaggtatccggtaagcggcagggtcggaacaggagagcgcacgagggagcttccagggggaaacgcctggtatctttatagtcctgtcgggtttcgccacctctgacttgagcgtcgatttttgtgatgctcgtcaggggggcggagcctatggaaaaacgccagcaacgcggcctttttacggttcctggccttttgctggccttttgctcacatgt

SEQ ID NO: 125 - RNA, 6882 nt, synthetic construct
  source 1..6882: mol_type = other RNA
  misc_feature 543..544: note = Adenine is connected to Guanine through the promoter sequence of shCaMKII
cctgcaggcagctgcgcgctcgctcgctcactgaggccgcccgggcaaagcccgggcgtcgggcgacctttggtcgcccggcctcagtgagcgagcgagcgcgcagagagggagtggccaactccatcactaggggttcctgcggccgcacgcgtggtaccgagggcctatttcccatgattccttcatatttgcatatacgatacaaggctgttagagagataattggaattaatttgactgtaaacacaaagatattagtacaaaatacgtgacgtagaaagtaataatttcttgggtagtttgcagttttaaaattatgttttaaaatggactatcatatgcttaccgtaacttgaaagtatttcgatttcttggctttatatatcttgtggaaaggacgaaacaccgcactgctgggggaagagacctgttttagtactctggaaacagaatctactaaaacaaggcaaaatgccgtgtttatctcgtcaacttgttggcgagatttttgcgacgcgtaattccacggggttaatcgaagatatcgaattcggtaccaccggtgccaccatggccccaaagaagaagcggaaggtcggtatccacggagtcccagcagccaagcggaactacatcctgggcctggccatcggcatcaccagcgtgggctacggcatcatcgactacgagacacgggacgtgatcgatgccggcgtgcggctgttcaaagaggccaacgtggaaaacaacgagggcaggcggagcaagagaggcgccagaaggctgaagcggcggaggcggcatagaatccagagagtgaagaagctgctgttcgactacaacctgctgaccgaccacagcgagctgagcggcatcaacccctacgaggccagagtgaagggcctgagccagaagctgagcgaggaagagttctctgccgccctgctgcacctggccaagagaagaggcgtgcacaacgtgaacgaggtggaagaggacaccggcaacgagctgtccaccaaagagcagatcagccggaacagcaaggccctggaagagaaatacgtggccgaactgcagctggaacggctgaagaaagacggcgaagtgcggggcagcatcaacagattcaagaccagcgactacgtgaaagaagccaaacagctgctgaaggtgcagaaggcctaccaccagctggaccagagcttcatcgacacctacatcgacctgctggaaacccggcggacctactatgagggacctggcgagggcagccccttcggctggaaggacatcaaagaatggtacgagatgctgatgggccactgcacctacttccccgaggaactgcggagcgtgaagtacgcctacaacgccgacctgtacaacgccctgaacgacctgaacaatctcgtgatcaccagggacgagaacgagaagctggaatattacgagaagttccagatcatcgagaacgtgttcaagcagaagaagaagcccaccctgaagcagatcgccaaagaaatcctcgtgaacgaagaggatattaagggctacagagtgaccagcaccggcaagcccgagttcaccaacctgaaggtgtaccacgacatcaaggacattaccgcccggaaagagattattgagaacgccgagctgctggatcagattgccaagatcctgaccatctaccagagcagcgaggacatccaggaagaactgaccaatctgaactccgagctgacccaggaagagatcgagcagatctctaatctgaagggctataccggcacccacaacctgagcctgaaggccatcaacctgatcctggacgagctgtggcacaccaacgacaaccagatcgctatcttcaaccggctgaagctggtgcccaagaaggtggacctgtcccagcagaaagagatccccaccaccctggtggacgacttcatcctgagccccgtcgtgaagagaagcttcatccagagcatcaaagtgatcaacgccatcatcaagaagtacggcctgcccaacgacatcattatcgagctggcccgcgagaagaactccaaggacgcccagaaaatgatcaacgagatgcagaagcggaaccggcagaccaacgagcggatcgaggaaatcatccggaccaccggcaaagagaacgccaagtacctgatcgagaagatcaagctgcacgacatgcaggaaggcaagtgcctgtacagcctggaagccatccctctggaagatctgctgaacaaccccttcaactatgaggtggaccacatcatccccagaagcgtgtccttcgacaacagcttcaacaacaaggtgctcgtgaagcaggaagaagccagcaagaagggcaaccggaccccattccagtacctgagcagcagcgacagcaagatcagctacgaaaccttcaagaagcacatcctgaatctggccaagggcaagggcagaatcagcaagaccaagaaagagtatctgctggaagaacgggacatcaacaggttctccgtgcagaaagacttcatcaaccggaacctggtggataccagatacgccaccagaggcctgatgaacctgctgcggagctacttcagagtgaacaacctggacgtgaaagtgaagtccatcaatggcggcttcaccagctttctgcggcggaagtggaagtttaagaaagagcggaacaaggggtacaagcaccacgccgaggacgccctgatcattgccaacgccgatttcatcttcaaagagtggaagaaactggacaaggccaaaaaagtgatggaaaaccagatgttcgaggaaaagcaggccgagagcatgcccgagatcgaaaccgagcaggagtacaaagagatcttcatcaccccccaccagatcaagcacattaaggacttcaaggactacaagtacagccaccgggtggacaagaagcctaatagagagctgattaacgacaccctgtactccacccggaaggacgacaagggcaacaccctgatcgtgaacaatctgaacggcctgtacgacaaggacaatgacaagctgaaaaagctgatcaacaagagccccgaaaagctgctgatgtaccaccacgacccccagacctaccagaaactgaagctgattatggaacagtacggcgacgagaagaatcccctgtacaagtactacgaggaaaccgggaactacctgaccaagtactccaaaaaggacaacggccccgtgatcaagaagattaagtattacggcaacaaactgaacgcccatctggacatcaccgacgactaccccaacagcagaaacaaggtcgtgaagctgtccctgaagccctacagattcgacgtgtacctggacaatggcgtgtacaagttcgtgaccgtgaagaatctggatgtgatcaaaaaagaaaactactacgaagtgaatagcaagtgctatgaggaagctaagaagctgaagaagatcagcaaccaggccgagtttatcgcctccttctacaacaacgatctgatcaagatcaacggcgagctgtatagagtgatcggcgtgaacaacgacctgctgaaccggatcgaagtgaacatgatcgacatcacctaccgcgagtacctggaaaacatgaacgacaagaggccccccaggatcattaagacaatcgcctccaagacccagagcattaagaagtacagcacagacattctgggcaacctgtatgaagtgaaatctaagaagcaccctcagatcatcaaaaagggcaaaaggccggcggccacgaaaaaggccggccaggcaaaaaagaaaaagggatccgaggccagcggttccggacgggctgacgcattggacgattttgatctggatatgctgggaagtgacgccctcgatgattttgaccttgacatgcttggttcggatgcccttgatgactttgacctcgacatgctcggcagtgacgcccttgatgatttcgacctggacatgctgattaactcaagatgatctagacatatggatatctgactagtctcgagtttattgcagcttataatggttacaaataaagcaatagcatcacaaatttcacaaataaagcatttttttcactggaccgagcggccgcaggaacccctagtgatggagttggccactccctctctgcgcgctcgctcgctcactgaggccgggcgaccaaaggtcgcccgacgcccgggctttgcccgggcggcctcagtgagcgagcgagcgcgcagctgcctgcaggggcgcctgatgcggtattttctccttacgcatctgtgcggtatttcacaccgcatacgtcaaagcaaccatagtacgcgccctgtagcggcgcattaagcgcggcgggtgtggtggttacgcgcagcgtgaccgctacacttgccagcgccctagcgcccgctcctttcgctttcttcccttcctttctcgccacgttcgccggctttccccgtcaagctctaaatcgggggctccctttagggttccgatttagtgctttacggcacctcgaccccaaaaaacttgatttgggtgatggttcacgtagtgggccatcgccctgatagacggtttttcgccctttgacgttggagtccacgttctttaatagtggactcttgttccaaactggaacaacactcaaccctatctcgggctattcttttgatttataagggattttgccgatttcggcctattggttaaaaaatgagctgatttaacaaaaatttaacgcgaattttaacaaaatattaacgtttacaattttatggtgcactctcagtacaatctgctctgatgccgcatagttaagccagccccgacacccgccaacacccgctgacgcgccctgacgggcttgtctgctcccggcatccgcttacagacaagctgtgaccgtctccgggagctgcatgtgtcagaggttttcaccgtcatcaccgaaacgcgcgagacgaaagggcctcgtgatacgcctatttttataggttaatgtcatgataataatggtttcttagacgtcaggtggcacttttcggggaaatgtgcgcggaacccctatttgtttatttttctaaatacattcaaatatgtatccgctcatgagacaataaccctgataaatgcttcaataatattgaaaaaggaagagtatgagtattcaacatttccgtgtcgcccttattcccttttttgcggcattttgccttcctgtttttgctcacccagaaacgctggtgaaagtaaaagatgctgaagatcagttgggtgcacgagtgggttacatcgaactggatctcaacagcggtaagatccttgagagttttcgccccgaagaacgttttccaatgatgagcacttttaaagttctgctatgtggcgcggtattatcccgtattgacgccgggcaagagcaactcggtcgccgcatacactattctcagaatgacttggttgagtactcaccagtcacagaaaagcatcttacggatggcatgacagtaagagaattatgcagtgctgccataaccatgagtgataacactgcggccaacttacttctgacaacgatcggaggaccgaaggagctaaccgcttttttgcacaacatgggggatcatgtaactcgccttgatcgttgggaaccggagctgaatgaagccataccaaacgacgagcgtgacaccacgatgcctgtagcaatggcaacaacgttgcgcaaactattaactggcgaactacttactctagcttcccggcaacaattaatagactggatggaggcggataaagttgcaggaccacttctgcgctcggcccttccggctggctggtttattgctgataaatctggagccggtgagcgtgggtctcgcggtatcattgcagcactggggccagatggtaagccctcccgtatcgtagttatctacacgacggggagtcaggcaactatggatgaacgaaatagacagatcgctgagataggtgcctcactgattaagcattggtaactgtcagaccaagtttactcatatatactttagattgatttaaaacttcatttttaatttaaaaggatctaggtgaagatcctttttgataatctcatgaccaaaatcccttaacgtgagttttcgttccactgagcgtcagaccccgtagaaaagatcaaaggatcttcttgagatcctttttttctgcgcgtaatctgctgcttgcaaacaaaaaaaccaccgctaccagcggtggtttgtttgccggatcaagagctaccaactctttttccgaaggtaactggcttcagcagagcgcagataccaaatactgtccttctagtgtagccgtagttaggccaccacttcaagaactctgtagcaccgcctacatacctcgctctgctaatcctgttaccagtggctgctgccagtggcgataagtcgtgtcttaccgggttggactcaagacgatagttaccggataaggcgcagcggtcgggctgaacggggggttcgtgcacacagcccagcttggagcgaacgacctacaccgaactgagatacctacagcgtgagctatgagaaagcgccacgcttcccgaagggagaaaggcggacaggtatccggtaagcggcagggtcggaacaggagagcgcacgagggagcttccagggggaaacgcctggtatctttatagtcctgtcgggtttcgccacctctgacttgagcgtcgatttttgtgatgctcgtcaggggggcggagcctatggaaaaacgccagcaacgcggcctttttacggttcctggccttttgctggccttttgctcacatgt

SEQ ID NO: 126 - RNA, 6881 nt, synthetic construct
  source 1..6881: mol_type = other RNA
  misc_feature 542..543: note = Adenine is connected to Guanine through the promoter sequence of shCaMKII
cctgcaggcagctgcgcgctcgctcgctcactgaggccgcccgggcaaagcccgggcgtcgggcgacctttggtcgcccggcctcagtgagcgagcgagcgcgcagagagggagtggccaactccatcactaggggttcctgcggccgcacgcgtggtaccgagggcctatttcccatgattccttcatatttgcatatacgatacaaggctgttagagagataattggaattaatttgactgtaaacacaaagatattagtacaaaatacgtgacgtagaaagtaataatttcttgggtagtttgcagttttaaaattatgttttaaaatggactatcatatgcttaccgtaacttgaaagtatttcgatttcttggctttatatatcttgtggaaaggacgaaacacctcctagcccggtaatccttgagttttagtactctggaaacagaatctactaaaacaaggcaaaatgccgtgtttatctcgtcaacttgttggcgagatttttgcgacgcgtaattccacggggttaatcgaagatatcgaattcggtaccaccggtgccaccatggccccaaagaagaagcggaaggtcggtatccacggagtcccagcagccaagcggaactacatcctgggcctggccatcggcatcaccagcgtgggctacggcatcatcgactacgagacacgggacgtgatcgatgccggcgtgcggctgttcaaagaggccaacgtggaaaacaacgagggcaggcggagcaagagaggcgccagaaggctgaagcggcggaggcggcatagaatccagagagtgaagaagctgctgttcgactacaacctgctgaccgaccacagcgagctgagcggcatcaacccctacgaggccagagtgaagggcctgagccagaagctgagcgaggaagagttctctgccgccctgctgcacctggccaagagaagaggcgtgcacaacgtgaacgaggtggaagaggacaccggcaacgagctgtccaccaaagagcagatcagccggaacagcaaggccctggaagagaaatacgtggccgaactgcagctggaacggctgaagaaagacggcgaagtgcggggcagcatcaacagattcaagaccagcgactacgtgaaagaagccaaacagctgctgaaggtgcagaaggcctaccaccagctggaccagagcttcatcgacacctacatcgacctgctggaaacccggcggacctactatgagggacctggcgagggcagccccttcggctggaaggacatcaaagaatggtacgagatgctgatgggccactgcacctacttccccgaggaactgcggagcgtgaagtacgcctacaacgccgacctgtacaacgccctgaacgacctgaacaatctcgtgatcaccagggacgagaacgagaagctggaatattacgagaagttccagatcatcgagaacgtgttcaagcagaagaagaagcccaccctgaagcagatcgccaaagaaatcctcgtgaacgaagaggatattaagggctacagagtgaccagcaccggcaagcccgagttcaccaacctgaaggtgtaccacgacatcaaggacattaccgcccggaaagagattattgagaacgccgagctgctggatcagattgccaagatcctgaccatctaccagagcagcgaggacatccaggaagaactgaccaatctgaactccgagctgacccaggaagagatcgagcagatctctaatctgaagggctataccggcacccacaacctgagcctgaaggccatcaacctgatcctggacgagctgtggcacaccaacgacaaccagatcgctatcttcaaccggctgaagctggtgcccaagaaggtggacctgtcccagcagaaagagatccccaccaccctggtggacgacttcatcctgagccccgtcgtgaagagaagcttcatccagagcatcaaagtgatcaacgccatcatcaagaagtacggcctgcccaacgacatcattatcgagctggcccgcgagaagaactccaaggacgcccagaaaatgatcaacgagatgcagaagcggaaccggcagaccaacgagcggatcgaggaaatcatccggaccaccggcaaagagaacgccaagtacctgatcgagaagatcaagctgcacgacatgcaggaaggcaagtgcctgtacagcctggaagccatccctctggaagatctgctgaacaaccccttcaactatgaggtggaccacatcatccccagaagcgtgtccttcgacaacagcttcaacaacaaggtgctcgtgaagcaggaagaagccagcaagaagggcaaccggaccccattccagtacctgagcagcagcgacagcaagatcagctacgaaaccttcaagaagcacatcctgaatctggccaagggcaagggcagaatcagcaagaccaagaaagagtatctgctggaagaacgggacatcaacaggttctccgtgcagaaagacttcatcaaccggaacctggtggataccagatacgccaccagaggcctgatgaacctgctgcggagctacttcagagtgaacaacctggacgtgaaagtgaagtccatcaatggcggcttcaccagctttctgcggcggaagtggaagtttaagaaagagcggaacaaggggtacaagcaccacgccgaggacgccctgatcattgccaacgccgatttcatcttcaaagagtggaagaaactggacaaggccaaaaaagtgatggaaaaccagatgttcgaggaaaagcaggccgagagcatgcccgagatcgaaaccgagcaggagtacaaagagatcttcatcaccccccaccagatcaagcacattaaggacttcaaggactacaagtacagccaccgggtggacaagaagcctaatagagagctgattaacgacaccctgtactccacccggaaggacgacaagggcaacaccctgatcgtgaacaatctgaacggcctgtacgacaaggacaatgacaagctgaaaaagctgatcaacaagagccccgaaaagctgctgatgtaccaccacgacccccagacctaccagaaactgaagctgattatggaacagtacggcgacgagaagaatcccctgtacaagtactacgaggaaaccgggaactacctgaccaagtactccaaaaaggacaacggccccgtgatcaagaagattaagtattacggcaacaaactgaacgcccatctggacatcaccgacgactaccccaacagcagaaacaaggtcgtgaagctgtccctgaagccctacagattcgacgtgtacctggacaatggcgtgtacaagttcgtgaccgtgaagaatctggatgtgatcaaaaaagaaaactactacgaagtgaatagcaagtgctatgaggaagctaagaagctgaagaagatcagcaaccaggccgagtttatcgcctccttctacaacaacgatctgatcaagatcaacggcgagctgtatagagtgatcggcgtgaacaacgacctgctgaaccggatcgaagtgaacatgatcgacatcacctaccgcgagtacctggaaaacatgaacgacaagaggccccccaggatcattaagacaatcgcctccaagacccagagcattaagaagtacagcacagacattctgggcaacctgtatgaagtgaaatctaagaagcaccctcagatcatcaaaaagggcaaaaggccggcggccacgaaaaaggccggccaggcaaaaaagaaaaagggatccgaggccagcggttccggacgggctgacgcattggacgattttgatctggatatgctgggaagtgacgccctcgatgattttgaccttgacatgcttggttcggatgcccttgatgactttgacctcgacatgctcggcagtgacgcccttgatgatttcgacctggacatgctgattaactcaagatgatctagacatatggatatctgactagtctcgagtttattgcagcttataatggttacaaataaagcaatagcatcacaaatttcacaaataaagcatttttttcactggaccgagcggccgcaggaacccctagtgatggagttggccactccctctctgcgcgctcgctcgctcactgaggccgggcgaccaaaggtcgcccgacgcccgggctttgcccgggcggcctcagtgagcgagcgagcgcgcagctgcctgcaggggcgcctgatgcggtattttctccttacgcatctgtgcggtatttcacaccgcatacgtcaaagcaaccatagtacgcgccctgtagcggcgcattaagcgcggcgggtgtggtggttacgcgcagcgtgaccgctacacttgccagcgccctagcgcccgctcctttcgctttcttcccttcctttctcgccacgttcgccggctttccccgtcaagctctaaatcgggggctccctttagggttccgatttagtgctttacggcacctcgaccccaaaaaacttgatttgggtgatggttcacgtagtgggccatcgccctgatagacggtttttcgccctttgacgttggagtccacgttctttaatagtggactcttgttccaaactggaacaacactcaaccctatctcgggctattcttttgatttataagggattttgccgatttcggcctattggttaaaaaatgagctgatttaacaaaaatttaacgcgaattttaacaaaatattaacgtttacaattttatggtgcactctcagtacaatctgctctgatgccgcatagttaagccagccccgacacccgccaacacccgctgacgcgccctgacgggcttgtctgctcccggcatccgcttacagacaagctgtgaccgtctccgggagctgcatgtgtcagaggttttcaccgtcatcaccgaaacgcgcgagacgaaagggcctcgtgatacgcctatttttataggttaatgtcatgataataatggtttcttagacgtcaggtggcacttttcggggaaatgtgcgcggaacccctatttgtttatttttctaaatacattcaaatatgtatccgctcatgagacaataaccctgataaatgcttcaataatattgaaaaaggaagagtatgagtattcaacatttccgtgtcgcccttattcccttttttgcggcattttgccttcctgtttttgctcacccagaaacgctggtgaaagtaaaagatgctgaagatcagttgggtgcacgagtgggttacatcgaactggatctcaacagcggtaagatccttgagagttttcgccccgaagaacgttttccaatgatgagcacttttaaagttctgctatgtggcgcggtattatcccgtattgacgccgggcaagagcaactcggtcgccgcatacactattctcagaatgacttggttgagtactcaccagtcacagaaaagcatcttacggatggcatgacagtaagagaattatgcagtgctgccataaccatgagtgataacactgcggccaacttacttctgacaacgatcggaggaccgaaggagctaaccgcttttttgcacaacatgggggatcatgtaactcgccttgatcgttgggaaccggagctgaatgaagccataccaaacgacgagcgtgacaccacgatgcctgtagcaatggcaacaacgttgcgcaaactattaactggcgaactacttactctagcttcccggcaacaattaatagactggatggaggcggataaagttgcaggaccacttctgcgctcggcccttccggctggctggtttattgctgataaatctggagccggtgagcgtgggtctcgcggtatcattgcagcactggggccagatggtaagccctcccgtatcgtagttatctacacgacggggagtcaggcaactatggatgaacgaaatagacagatcgctgagataggtgcctcactgattaagcattggtaactgtcagaccaagtttactcatatatactttagattgatttaaaacttcatttttaatttaaaaggatctaggtgaagatcctttttgataatctcatgaccaaaatcccttaacgtgagttttcgttccactgagcgtcagaccccgtagaaaagatcaaaggatcttcttgagatcctttttttctgcgcgtaatctgctgcttgcaaacaaaaaaaccaccgctaccagcggtggtttgtttgccggatcaagagctaccaactctttttccgaaggtaactggcttcagcagagcgcagataccaaatactgtccttctagtgtagccgtagttaggccaccacttcaagaactctgtagcaccgcctacatacctcgctctgctaatcctgttaccagtggctgctgccagtggcgataagtcgtgtcttaccgggttggactcaagacgatagttaccggataaggcgcagcggtcgggctgaacggggggttcgtgcacacagcccagcttggagcgaacgacctacaccgaactgagatacctacagcgtgagctatgagaaagcgccacgcttcccgaagggagaaaggcggacaggtatccggtaagcggcagggtcggaacaggagagcgcacgagggagcttccagggggaaacgcctggtatctttatagtcctgtcgggtttcgccacctctgacttgagcgtcgatttttgtgatgctcgtcaggggggcggagcctatggaaaaacgccagcaacgcggcctttttacggttcctggccttttgctggccttttgctcacatgt

SEQ ID NO: 127 - RNA, 6881 nt, synthetic construct
  source 1..6881: mol_type = other RNA
  misc_feature 542..543: note = Adenine is connected to Guanine through the promoter sequence of shCaMKII
cctgcaggcagctgcgcgctcgctcgctcactgaggccgcccgggcaaagcccgggcgtcgggcgacctttggtcgcccggcctcagtgagcgagcgagcgcgcagagagggagtggccaactccatcactaggggttcctgcggccgcacgcgtggtaccgagggcctatttcccatgattccttcatatttgcatatacgatacaaggctgttagagagataattggaattaatttgactgtaaacacaaagatattagtacaaaatacgtgacgtagaaagtaataatttcttgggtagtttgcagttttaaaattatgttttaaaatggactatcatatgcttaccgtaacttgaaagtatttcgatttcttggctttatatatcttgtggaaaggacgaaacaccctactgccgctgcagcggggcgttttagtactctggaaacagaatctactaaaacaaggcaaaatgccgtgtttatctcgtcaacttgttggcgagatttttgcgacgcgtaattccacggggttaatcgaagatatcgaattcggtaccaccggtgccaccatggccccaaagaagaagcggaaggtcggtatccacggagtcccagcagccaagcggaactacatcctgggcctggccatcggcatcaccagcgtgggctacggcatcatcgactacgagacacgggacgtgatcgatgccggcgtgcggctgttcaaagaggccaacgtggaaaacaacgagggcaggcggagcaagagaggcgccagaaggctgaagcggcggaggcggcatagaatccagagagtgaagaagctgctgttcgactacaacctgctgaccgaccacagcgagctgagcggcatcaacccctacgaggccagagtgaagggcctgagccagaagctgagcgaggaagagttctctgccgccctgctgcacctggccaagagaagaggcgtgcacaacgtgaacgaggtggaagaggacaccggcaacgagctgtccaccaaagagcagatcagccggaacagcaaggccctggaagagaaatacgtggccgaactgcagctggaacggctgaagaaagacggcgaagtgcggggcagcatcaacagattcaagaccagcgactacgtgaaagaagccaaacagctgctgaaggtgcagaaggcctaccaccagctggaccagagcttcatcgacacctacatcgacctgctggaaacccggcggacctactatgagggacctggcgagggcagccccttcggctggaaggacatcaaagaatggtacgagatgctgatgggccactgcacctacttccccgaggaactgcggagcgtgaagtacgcctacaacgccgacctgtacaacgccctgaacgacctgaacaatctcgtgatcaccagggacgagaacgagaagctggaatattacgagaagttccagatcatcgagaacgtgttcaagcagaagaagaagcccaccctgaagcagatcgccaaagaaatcctcgtgaacgaagaggatattaagggctacagagtgaccagcaccggcaagcccgagttcaccaacctgaaggtgtaccacgacatcaaggacattaccgcccggaaagagattattgagaacgccgagctgctggatcagattgccaagatcctgaccatctaccagagcagcgaggacatccaggaagaactgaccaatctgaactccgagctgacccaggaagagatcgagcagatctctaatctgaagggctataccggcacccacaacctgagcctgaaggccatcaacctgatcctggacgagctgtggcacaccaacgacaaccagatcgctatcttcaaccggctgaagctggtgcccaagaaggtggacctgtcccagcagaaagagatccccaccaccctggtggacgacttcatcctgagccccgtcgtgaagagaagcttcatccagagcatcaaagtgatcaacgccatcatcaagaagtacggcctgcccaacgacatcattatcgagctggcccgcgagaagaactccaaggacgcccagaaaatgatcaacgagatgcagaagcggaaccggcagaccaacgagcggatcgaggaaatcatccggaccaccggcaaagagaacgccaagtacctgatcgagaagatcaagctgcacgacatgcaggaaggcaagtgcctgtacagcctggaagccatccctctggaagatctgctgaacaaccccttcaactatgaggtggaccacatcatccccagaagcgtgtccttcgacaacagcttcaacaacaaggtgctcgtgaagcaggaagaagccagcaagaagggcaaccggaccccattccagtacctgagcagcagcgacagcaagatcagctacgaaaccttcaagaagcacatcctgaatctggccaagggcaagggcagaatcagcaagaccaagaaagagtatctgctggaagaacgggacatcaacaggttctccgtgcagaaagacttcatcaaccggaacctggtggataccagatacgccaccagaggcctgatgaacctgctgcggagctacttcagagtgaacaacctggacgtgaaagtgaagtccatcaatggcggcttcaccagctttctgcggcggaagtggaagtttaagaaagagcggaacaaggggtacaagcaccacgccgaggacgccctgatcattgccaacgccgatttcatcttcaaagagtggaagaaactggacaaggccaaaaaagtgatggaaaaccagatgttcgaggaaaagcaggccgagagcatgcccgagatcgaaaccgagcaggagtacaaagagatcttcatcaccccccaccagatcaagcacattaaggacttcaaggactacaagtacagccaccgggtggacaagaagcctaatagagagctgattaacgacaccctgtactccacccggaaggacgacaagggcaacaccctgatcgtgaacaatctgaacggcctgtacgacaaggacaatgacaagctgaaaaagctgatcaacaagagccccgaaaagctgctgatgtaccaccacgacccccagacctaccagaaactgaagctgattatggaacagtacggcgacgagaagaatcccctgtacaagtactacgaggaaaccgggaactacctgaccaagtactccaaaaaggacaacggccccgtgatcaagaagattaagtattacggcaacaaactgaacgcccatctggacatcaccgacgactaccccaacagcagaaacaaggtcgtgaagctgtccctgaagccctacagattcgacgtgtacctggacaatggcgtgtacaagttcgtgaccgtgaagaatctggatgtgatcaaaaaagaaaactactacgaagtgaatagcaagtgctatgaggaagctaagaagctgaagaagatcagcaaccaggccgagtttatcgcctccttctacaacaacgatctgatcaagatcaacggcgagctgtatagagtgatcggcgtgaacaacgacctgctgaaccggatcgaagtgaacatgatcgacatcacctaccgcgagtacctggaaaacatgaacgacaagaggccccccaggatcattaagacaatcgcctccaagacccagagcattaagaagtacagcacagacattctgggcaacctgtatgaagtgaaatctaagaagcaccctcagatcatcaaaaagggcaaaaggccggcggccacgaaaaaggccggccaggcaaaaaagaaaaagggatccgaggccagcggttccggacgggctgacgcattggacgattttgatctggatatgctgggaagtgacgccctcgatgattttgaccttgacatgcttggttcggatgcccttgatgactttgacctcgacatgctcggcagtgacgcccttgatgatttcgacctggacatgctgattaactcaagatgatctagacatatggatatctgactagtctcgagtttattgcagcttataatggttacaaataaagcaatagcatcacaaatttcacaaataaagcatttttttcactggaccgagcggccgcaggaacccctagtgatggagttggccactccctctctgcgcgctcgctcgctcactgaggccgggcgaccaaaggtcgcccgacgcccgggctttgcccgggcggcctcagtgagcgagcgagcgcgcagctgcctgcaggggcgcctgatgcggtattttctccttacgcatctgtgcggtatttcacaccgcatacgtcaaagcaaccatagtacgcgccctgtagcggcgcattaagcgcggcgggtgtggtggttacgcgcagcgtgaccgctacacttgccagcgccctagcgcccgctcctttcgctttcttcccttcctttctcgccacgttcgccggctttccccgtcaagctctaaatcgggggctccctttagggttccgatttagtgctttacggcacctcgaccccaaaaaacttgatttgggtgatggttcacgtagtgggccatcgccctgatagacggtttttcgccctttgacgttggagtccacgttctttaatagtggactcttgttccaaactggaacaacactcaaccctatctcgggctattcttttgatttataagggattttgccgatttcggcctattggttaaaaaatgagctgatttaacaaaaatttaacgcgaattttaacaaaatattaacgtttacaattttatggtgcactctcagtacaatctgctctgatgccgcatagttaagccagccccgacacccgccaacacccgctgacgcgccctgacgggcttgtctgctcccggcatccgcttacagacaagctgtgaccgtctccgggagctgcatgtgtcagaggttttcaccgtcatcaccgaaacgcgcgagacgaaagggcctcgtgatacgcctatttttataggttaatgtcatgataataatggtttcttagacgtcaggtggcacttttcggggaaatgtgcgcggaacccctatttgtttatttttctaaatacattcaaatatgtatccgctcatgagacaataaccctgataaatgcttcaataatattgaaaaaggaagagtatgagtattcaacatttccgtgtcgcccttattcccttttttgcggcattttgccttcctgtttttgctcacccagaaacgctggtgaaagtaaaagatgctgaagatcagttgggtgcacgagtgggttacatcgaactggatctcaacagcggtaagatccttgagagttttcgccccgaagaacgttttccaatgatgagcacttttaaagttctgctatgtggcgcggtattatcccgtattgacgccgggcaagagcaactcggtcgccgcatacactattctcagaatgacttggttgagtactcaccagtcacagaaaagcatcttacggatggcatgacagtaagagaattatgcagtgctgccataaccatgagtgataacactgcggccaacttacttctgacaacgatcggaggaccgaaggagctaaccgcttttttgcacaacatgggggatcatgtaactcgccttgatcgttgggaaccggagctgaatgaagccataccaaacgacgagcgtgacaccacgatgcctgtagcaatggcaacaacgttgcgcaaactattaactggcgaactacttactctagcttcccggcaacaattaatagactggatggaggcggataaagttgcaggaccacttctgcgctcggcccttccggctggctggtttattgctgataaatctggagccggtgagcgtgggtctcgcggtatcattgcagcactggggccagatggtaagccctcccgtatcgtagttatctacacgacggggagtcaggcaactatggatgaacgaaatagacagatcgctgagataggtgcctcactgattaagcattggtaactgtcagaccaagtttactcatatatactttagattgatttaaaacttcatttttaatttaaaaggatctaggtgaagatcctttttgataatctcatgaccaaaatcccttaacgtgagttttcgttccactgagcgtcagaccccgtagaaaagatcaaaggatcttcttgagatcctttttttctgcgcgtaatctgctgcttgcaaacaaaaaaaccaccgctaccagcggtggtttgtttgccggatcaagagctaccaactctttttccgaaggtaactggcttcagcagagcgcagataccaaatactgtccttctagtgtagccgtagttaggccaccacttcaagaactctgtagcaccgcctacatacctcgctctgctaatcctgttaccagtggctgctgccagtggcgataagtcgtgtcttaccgggttggactcaagacgatagttaccggataaggcgcagcggtcgggctgaacggggggttcgtgcacacagcccagcttggagcgaacgacctacaccgaactgagatacctacagcgtgagctatgagaaagcgccacgcttcccgaagggagaaaggcggacaggtatccggtaagcggcagggtcggaacaggagagcgcacgagggagcttccagggggaaacgcctggtatctttatagtcctgtcgggtttcgccacctctgacttgagcgtcgatttttgtgatgctcgtcaggggggcggagcctatggaaaaacgccagcaacgcggcctttttacggttcctggccttttgctggccttttgctcacatgt

SEQ ID NO: 128 - RNA, 7203 nt, synthetic construct
  source 1..7203: mol_type = other RNA
  misc_feature 870..871: note = Cytosine is connected to Guanine through the promoter sequence of shCaMKII
cctgcaggcagctgcgcgctcgctcgctcactgaggccgcccgggcaaagcccgggcgtcgggcgacctttggtcgcccggcctcagtgagcgagcgagcgcgcagagagggagtggccaactccatcactaggggttcctgcggccgcacgcgtgagggcctatttcccatgattccttcatatttgcatatacgatacaaggctgttagagagataattggaattaatttgactgtaaacacaaagatattagtacaaaatacgtgacgtagaaagtaataatttcttgggtagtttgcagttttaaaattatgttttaaaatggactatcatatgcttaccgtaacttgaaagtatttcgatttcttggctttatatatcttgtggaaaggacgaaacaccgccccagccggcccctttaatgttttagtactctggaaacagaatctactaaaacaaggcaaaatgccgtgtttatctcgtcaacttgttggcgagatttttgggcccgagggcctatttcccatgattccttcatatttgcatatacgatacaaggctgttagagagataattggaattaatttgactgtaaacacaaagatattagtacaaaatacgtgacgtagaaagtaataatttcttgggtagtttgcagttttaaaattatgttttaaaatggactatcatatgcttaccgtaacttgaaagtatttcgatttcttggctttatatatcttgtggaaaggacgaaacaccgcactgctgggggaagagacctgttttagtactctggaaacagaatctactaaaacaaggcaaaatgccgtgtttatctcgtcaacttgttggcgagatttttgctagcgaattcggtaccaccggtgccaccatggccccaaagaagaagcggaaggtcggtatccacggagtcccagcagccaagcggaactacatcctgggcctggccatcggcatcaccagcgtgggctacggcatcatcgactacgagacacgggacgtgatcgatgccggcgtgcggctgttcaaagaggccaacgtggaaaacaacgagggcaggcggagcaagagaggcgccagaaggctgaagcggcggaggcggcatagaatccagagagtgaagaagctgctgttcgactacaacctgctgaccgaccacagcgagctgagcggcatcaacccctacgaggccagagtgaagggcctgagccagaagctgagcgaggaagagttctctgccgccctgctgcacctggccaagagaagaggcgtgcacaacgtgaacgaggtggaagaggacaccggcaacgagctgtccaccaaagagcagatcagccggaacagcaaggccctggaagagaaatacgtggccgaactgcagctggaacggctgaagaaagacggcgaagtgcggggcagcatcaacagattcaagaccagcgactacgtgaaagaagccaaacagctgctgaaggtgcagaaggcctaccaccagctggaccagagcttcatcgacacctacatcgacctgctggaaacccggcggacctactatgagggacctggcgagggcagccccttcggctggaaggacatcaaagaatggtacgagatgctgatgggccactgcacctacttccccgaggaactgcggagcgtgaagtacgcctacaacgccgacctgtacaacgccctgaacgacctgaacaatctcgtgatcaccagggacgagaacgagaagctggaatattacgagaagttccagatcatcgagaacgtgttcaagcagaagaagaagcccaccctgaagcagatcgccaaagaaatcctcgtgaacgaagaggatattaagggctacagagtgaccagcaccggcaagcccgagttcaccaacctgaaggtgtaccacgacatcaaggacattaccgcccggaaagagattattgagaacgccgagctgctggatcagattgccaagatcctgaccatctaccagagcagcgaggacatccaggaagaactgaccaatctgaactccgagctgacccaggaagagatcgagcagatctctaatctgaagggctataccggcacccacaacctgagcctgaaggccatcaacctgatcctggacgagctgtggcacaccaacgacaaccagatcgctatcttcaaccggctgaagctggtgcccaagaaggtggacctgtcccagcagaaagagatccccaccaccctggtggacgacttcatcctgagccccgtcgtgaagagaagcttcatccagagcatcaaagtgatcaacgccatcatcaagaagtacggcctgcccaacgacatcattatcgagctggcccgcgagaagaactccaaggacgcccagaaaatgatcaacgagatgcagaagcggaaccggcagaccaacgagcggatcgaggaaatcatccggaccaccggcaaagagaacgccaagtacctgatcgagaagatcaagctgcacgacatgcaggaaggcaagtgcctgtacagcctggaagccatccctctggaagatctgctgaacaaccccttcaactatgaggtggaccacatcatccccagaagcgtgtccttcgacaacagcttcaacaacaaggtgctcgtgaagcaggaagaagccagcaagaagggcaaccggaccccattccagtacctgagcagcagcgacagcaagatcagctacgaaaccttcaagaagcacatcctgaatctggccaagggcaagggcagaatcagcaagaccaagaaagagtatctgctggaagaacgggacatcaacaggttctccgtgcagaaagacttcatcaaccggaacctggtggataccagatacgccaccagaggcctgatgaacctgctgcggagctacttcagagtgaacaacctggacgtgaaagtgaagtccatcaatggcggcttcaccagctttctgcggcggaagtggaagtttaagaaagagcggaacaaggggtacaagcaccacgccgaggacgccctgatcattgccaacgccgatttcatcttcaaagagtggaagaaactggacaaggccaaaaaagtgatggaaaaccagatgttcgaggaaaagcaggccgagagcatgcccgagatcgaaaccgagcaggagtacaaagagatcttcatcaccccccaccagatcaagcacattaaggacttcaaggactacaagtacagccaccgggtggacaagaagcctaatagagagctgattaacgacaccctgtactccacccggaaggacgacaagggcaacaccctgatcgtgaacaatctgaacggcctgtacgacaaggacaatgacaagctgaaaaagctgatcaacaagagccccgaaaagctgctgatgtaccaccacgacccccagacctaccagaaactgaagctgattatggaacagtacggcgacgagaagaatcccctgtacaagtactacgaggaaaccgggaactacctgaccaagtactccaaaaaggacaacggccccgtgatcaagaagattaagtattacggcaacaaactgaacgcccatctggacatcaccgacgactaccccaacagcagaaacaaggtcgtgaagctgtccctgaagccctacagattcgacgtgtacctggacaatggcgtgtacaagttcgtgaccgtgaagaatctggatgtgatcaaaaaagaaaactactacgaagtgaatagcaagtgctatgaggaagctaagaagctgaagaagatcagcaaccaggccgagtttatcgcctccttctacaacaacgatctgatcaagatcaacggcgagctgtatagagtgatcggcgtgaacaacgacctgctgaaccggatcgaagtgaacatgatcgacatcacctaccgcgagtacctggaaaacatgaacgacaagaggccccccaggatcattaagacaatcgcctccaagacccagagcattaagaagtacagcacagacattctgggcaacctgtatgaagtgaaatctaagaagcaccctcagatcatcaaaaagggcaaaaggccggcggccacgaaaaaggccggccaggcaaaaaagaaaaagggatccgaggccagcggttccggacgggctgacgcattggacgattttgatctggatatgctgggaagtgacgccctcgatgattttgaccttgacatgcttggttcggatgcccttgatgactttgacctcgacatgctcggcagtgacgcccttgatgatttcgacctggacatgctgattaactcaagatgatctagacatatggatatctgactagtctcgagtttattgcagcttataatggttacaaataaagcaatagcatcacaaatttcacaaataaagcatttttttcactggaccgagcggccgcaggaacccctagtgatggagttggccactccctctctgcgcgctcgctcgctcactgaggccgggcgaccaaaggtcgcccgacgcccgggctttgcccgggcggcctcagtgagcgagcgagcgcgcagctgcctgcaggggcgcctgatgcggtattttctccttacgcatctgtgcggtatttcacaccgcatacgtcaaagcaaccatagtacgcgccctgtagcggcgcattaagcgcggcgggtgtggtggttacgcgcagcgtgaccgctacacttgccagcgccctagcgcccgctcctttcgctttcttcccttcctttctcgccacgttcgccggctttccccgtcaagctctaaatcgggggctccctttagggttccgatttagtgctttacggcacctcgaccccaaaaaacttgatttgggtgatggttcacgtagtgggccatcgccctgatagacggtttttcgccctttgacgttggagtccacgttctttaatagtggactcttgttccaaactggaacaacactcaaccctatctcgggctattcttttgatttataagggattttgccgatttcggcctattggttaaaaaatgagctgatttaacaaaaatttaacgcgaattttaacaaaatattaacgtttacaattttatggtgcactctcagtacaatctgctctgatgccgcatagttaagccagccccgacacccgccaacacccgctgacgcgccctgacgggcttgtctgctcccggcatccgcttacagacaagctgtgaccgtctccgggagctgcatgtgtcagaggttttcaccgtcatcaccgaaacgcgcgagacgaaagggcctcgtgatacgcctatttttataggttaatgtcatgataataatggtttcttagacgtcaggtggcacttttcggggaaatgtgcgcggaacccctatttgtttatttttctaaatacattcaaatatgtatccgctcatgagacaataaccctgataaatgcttcaataatattgaaaaaggaagagtatgagtattcaacatttccgtgtcgcccttattcccttttttgcggcattttgccttcctgtttttgctcacccagaaacgctggtgaaagtaaaagatgctgaagatcagttgggtgcacgagtgggttacatcgaactggatctcaacagcggtaagatccttgagagttttcgccccgaagaacgttttccaatgatgagcacttttaaagttctgctatgtggcgcggtattatcccgtattgacgccgggcaagagcaactcggtcgccgcatacactattctcagaatgacttggttgagtactcaccagtcacagaaaagcatcttacggatggcatgacagtaagagaattatgcagtgctgccataaccatgagtgataacactgcggccaacttacttctgacaacgatcggaggaccgaaggagctaaccgcttttttgcacaacatgggggatcatgtaactcgccttgatcgttgggaaccggagctgaatgaagccataccaaacgacgagcgtgacaccacgatgcctgtagcaatggcaacaacgttgcgcaaactattaactggcgaactacttactctagcttcccggcaacaattaatagactggatggaggcggataaagttgcaggaccacttctgcgctcggcccttccggctggctggtttattgctgataaatctggagccggtgagcgtgggtctcgcggtatcattgcagcactggggccagatggtaagccctcccgtatcgtagttatctacacgacggggagtcaggcaactatggatgaacgaaatagacagatcgctgagataggtgcctcactgattaagcattggtaactgtcagaccaagtttactcatatatactttagattgatttaaaacttcatttttaatttaaaaggatctaggtgaagatcctttttgataatctcatgaccaaaatcccttaacgtgagttttcgttccactgagcgtcagaccccgtagaaaagatcaaaggatcttcttgagatcctttttttctgcgcgtaatctgctgcttgcaaacaaaaaaaccaccgctaccagcggtggtttgtttgccggatcaagagctaccaactctttttccgaaggtaactggcttcagcagagcgcagataccaaatactgtccttctagtgtagccgtagttaggccaccacttcaagaactctgtagcaccgcctacatacctcgctctgctaatcctgttaccagtggctgctgccagtggcgataagtcgtgtcttaccgggttggactcaagacgatagttaccggataaggcgcagcggtcgggctgaacggggggttcgtgcacacagcccagcttggagcgaacgacctacaccgaactgagatacctacagcgtgagctatgagaaagcgccacgcttcccgaagggagaaaggcggacaggtatccggtaagcggcagggtcggaacaggagagcgcacgagggagcttccagggggaaacgcctggtatctttatagtcctgtcgggtttcgccacctctgacttgagcgtcgatttttgtgatgctcgtcaggggggcggagcctatggaaaaacgccagcaacgcggcctttttacggttcctggccttttgctggccttttgctcacatgt

SEQ ID NO: 129 - RNA, 7205 nt, synthetic construct
  source 1..7205: mol_type = other RNA
  misc_feature 872..873: note = Cytosine is connected to Guanine through the promoter sequence of shCaMKII
cctgcaggcagctgcgcgctcgctcgctcactgaggccgcccgggcaaagcccgggcgtcgggcgacctttggtcgcccggcctcagtgagcgagcgagcgcgcagagagggagtggccaactccatcactaggggttcctgcggccgcacgcgtgagggcctatttcccatgattccttcatatttgcatatacgatacaaggctgttagagagataattggaattaatttgactgtaaacacaaagatattagtacaaaatacgtgacgtagaaagtaataatttcttgggtagtttgcagttttaaaattatgttttaaaatggactatcatatgcttaccgtaacttgaaagtatttcgatttcttggctttatatatcttgtggaaaggacgaaacacctcctagcccggtaatccttgagttttagtactctggaaacagaatctactaaaacaaggcaaaatgccgtgtttatctcgtcaacttgttggcgagattttttgggcccgagggcctatttcccatgattccttcatatttgcatatacgatacaaggctgttagagagataattggaattaatttgactgtaaacacaaagatattagtacaaaatacgtgacgtagaaagtaataatttcttgggtagtttgcagttttaaaattatgttttaaaatggactatcatatgcttaccgtaacttgaaagtatttcgatttcttggctttatatatcttgtggaaaggacgaaacaccgctactgccgctgcagcggggcgttttagtactctggaaacagaatctactaaaacaaggcaaaatgccgtgtttatctcgtcaacttgttggcgagattttttgctagcgaattcggtaccaccggtgccaccatggccccaaagaagaagcggaaggtcggtatccacggagtcccagcagccaagcggaactacatcctgggcctggccatcggcatcaccagcgtgggctacggcatcatcgactacgagacacgggacgtgatcgatgccggcgtgcggctgttcaaagaggccaacgtggaaaacaacgagggcaggcggagcaagagaggcgccagaaggctgaagcggcggaggcggcatagaatccagagagtgaagaagctgctgttcgactacaacctgctgaccgaccacagcgagctgagcggcatcaacccctacgaggccagagtgaagggcctgagccagaagctgagcgaggaagagttctctgccgccctgctgcacctggccaagagaagaggcgtgcacaacgtgaacgaggtggaagaggacaccggcaacgagctgtccaccaaagagcagatcagccggaacagcaaggccctggaagagaaatacgtggccgaactgcagctggaacggctgaagaaagacggcgaagtgcggggcagcatcaacagattcaagaccagcgactacgtgaaagaagccaaacagctgctgaaggtgcagaaggcctaccaccagctggaccagagcttcatcgacacctacatcgacctgctggaaacccggcggacctactatgagggacctggcgagggcagccccttcggctggaaggacatcaaagaatggtacgagatgctgatgggccactgcacctacttccccgaggaactgcggagcgtgaagtacgcctacaacgccgacctgtacaacgccctgaacgacctgaacaatctcgtgatcaccagggacgagaacgagaagctggaatattacgagaagttccagatcatcgagaacgtgttcaagcagaagaagaagcccaccctgaagcagatcgccaaagaaatcctcgtgaacgaagaggatattaagggctacagagtgaccagcaccggcaagcccgagttcaccaacctgaaggtgtaccacgacatcaaggacattaccgcccggaaagagattattgagaacgccgagctgctggatcagattgccaagatcctgaccatctaccagagcagcgaggacatccaggaagaactgaccaatctgaactccgagctgacccaggaagagatcgagcagatctctaatctgaagggctataccggcacccacaacctgagcctgaaggccatcaacctgatcctggacgagctgtggcacaccaacgacaaccagatcgctatcttcaaccggctgaagctggtgcccaagaaggtggacctgtcccagcagaaagagatccccaccaccctggtggacgacttcatcctgagccccgtcgtgaagagaagcttcatccagagcatcaaagtgatcaacgccatcatcaagaagtacggcctgcccaacgacatcattatcgagctggcccgcgagaagaactccaaggacgcccagaaaatgatcaacgagatgcagaagcggaaccggcagaccaacgagcggatcgaggaaatcatccggaccaccggcaaagagaacgccaagtacctgatcgagaagatcaagctgcacgacatgcaggaaggcaagtgcctgtacagcctggaagccatccctctggaagatctgctgaacaaccccttcaactatgaggtggaccacatcatccccagaagcgtgtccttcgacaacagcttcaacaacaaggtgctcgtgaagcaggaagaagccagcaagaagggcaaccggaccccattccagtacctgagcagcagcgacagcaagatcagctacgaaaccttcaagaagcacatcctgaatctggccaagggcaagggcagaatcagcaagaccaagaaagagtatctgctggaagaacgggacatcaacaggttctccgtgcagaaagacttcatcaaccggaacctggtggataccagatacgccaccagaggcctgatgaacctgctgcggagctacttcagagtgaacaacctggacgtgaaagtgaagtccatcaatggcggcttcaccagctttctgcggcggaagtggaagtttaagaaagagcggaacaaggggtacaagcaccacgccgaggacgccctgatcattgccaacgccgatttcatcttcaaagagtggaagaaactggacaaggccaaaaaagtgatggaaaaccagatgttcgaggaaaagcaggccgagagcatgcccgagatcgaaaccgagcaggagtacaaagagatcttcatcaccccccaccagatcaagcacattaaggacttcaaggactacaagtacagccaccgggtggacaagaagcctaatagagagctgattaacgacaccctgtactccacccggaaggacgacaagggcaacaccctgatcgtgaacaatctgaacggcctgtacgacaaggacaatgacaagctgaaaaagctgatcaacaagagccccgaaaagctgctgatgtaccaccacgacccccagacctaccagaaactgaagctgattatggaacagtacggcgacgagaagaatcccctgtacaagtactacgaggaaaccgggaactacctgaccaagtactccaaaaaggacaacggccccgtgatcaagaagattaagtattacggcaacaaactgaacgcccatctggacatcaccgacgactaccccaacagcagaaacaaggtcgtgaagctgtccctgaagccctacagattcgacgtgtacctggacaatggcgtgtacaagttcgtgaccgtgaagaatctggatgtgatcaaaaaagaaaactactacgaagtgaatagcaagtgctatgaggaagctaagaagctgaagaagatcagcaaccaggccgagtttatcgcctccttctacaacaacgatctgatcaagatcaacggcgagctgtatagagtgatcggcgtgaacaacgacctgctgaaccggatcgaagtgaacatgatcgacatcacctaccgcgagtacctggaaaacatgaacgacaagaggccccccaggatcattaagacaatcgcctccaagacccagagcattaagaagtacagcacagacattctgggcaacctgtatgaagtgaaatctaagaagcaccctcagatcatcaaaaagggcaaaaggccggcggccacgaaaaaggccggccaggcaaaaaagaaaaagggatccgaggccagcggttccggacgggctgacgcattggacgattttgatctggatatgctgggaagtgacgccctcgatgattttgaccttgacatgcttggttcggatgcccttgatgactttgacctcgacatgctcggcagtgacgcccttgatgatttcgacctggacatgctgattaactcaagatgatctagacatatggatatctgactagtctcgagtttattgcagcttataatggttacaaataaagcaatagcatcacaaatttcacaaataaagcatttttttcactggaccgagcggccgcaggaacccctagtgatggagttggccactccctctctgcgcgctcgctcgctcactgaggccgggcgaccaaaggtcgcccgacgcccgggctttgcccgggcggcctcagtgagcgagcgagcgcgcagctgcctgcaggggcgcctgatgcggtattttctccttacgcatctgtgcggtatttcacaccgcatacgtcaaagcaaccatagtacgcgccctgtagcggcgcattaagcgcggcgggtgtggtggttacgcgcagcgtgaccgctacacttgccagcgccctagcgcccgctcctttcgctttcttcccttcctttctcgccacgttcgccggctttccccgtcaagctctaaatcgggggctccctttagggttccgatttagtgctttacggcacctcgaccccaaaaaacttgatttgggtgatggttcacgtagtgggccatcgccctgatagacggtttttcgccctttgacgttggagtccacgttctttaatagtggactcttgttccaaactggaacaacactcaaccctatctcgggctattcttttgatttataagggattttgccgatttcggcctattggttaaaaaatgagctgatttaacaaaaatttaacgcgaattttaacaaaatattaacgtttacaattttatggtgcactctcagtacaatctgctctgatgccgcatagttaagccagccccgacacccgccaacacccgctgacgcgccctgacgggcttgtctgctcccggcatccgcttacagacaagctgtgaccgtctccgggagctgcatgtgtcagaggttttcaccgtcatcaccgaaacgcgcgagacgaaagggcctcgtgatacgcctatttttataggttaatgtcatgataataatggtttcttagacgtcaggtggcacttttcggggaaatgtgcgcggaacccctatttgtttatttttctaaatacattcaaatatgtatccgctcatgagacaataaccctgataaatgcttcaataatattgaaaaaggaagagtatgagtattcaacatttccgtgtcgcccttattcccttttttgcggcattttgccttcctgtttttgctcacccagaaacgctggtgaaagtaaaagatgctgaagatcagttgggtgcacgagtgggttacatcgaactggatctcaacagcggtaagatccttgagagttttcgccccgaagaacgttttccaatgatgagcacttttaaagttctgctatgtggcgcggtattatcccgtattgacgccgggcaagagcaactcggtcgccgcatacactattctcagaatgacttggttgagtactcaccagtcacagaaaagcatcttacggatggcatgacagtaagagaattatgcagtgctgccataaccatgagtgataacactgcggccaacttacttctgacaacgatcggaggaccgaaggagctaaccgcttttttgcacaacatgggggatcatgtaactcgccttgatcgttgggaaccggagctgaatgaagccataccaaacgacgagcgtgacaccacgatgcctgtagcaatggcaacaacgttgcgcaaactattaactggcgaactacttactctagcttcccggcaacaattaatagactggatggaggcggataaagttgcaggaccacttctgcgctcggcccttccggctggctggtttattgctgataaatctggagccggtgagcgtgggtctcgcggtatcattgcagcactggggccagatggtaagccctcccgtatcgtagttatctacacgacggggagtcaggcaactatggatgaacgaaatagacagatcgctgagataggtgcctcactgattaagcattggtaactgtcagaccaagtttactcatatatactttagattgatttaaaacttcatttttaatttaaaaggatctaggtgaagatcctttttgataatctcatgaccaaaatcccttaacgtgagttttcgttccactgagcgtcagaccccgtagaaaagatcaaaggatcttcttgagatcctttttttctgcgcgtaatctgctgcttgcaaacaaaaaaaccaccgctaccagcggtggtttgtttgccggatcaagagctaccaactctttttccgaaggtaactggcttcagcagagcgcagataccaaatactgtccttctagtgtagccgtagttaggccaccacttcaagaactctgtagcaccgcctacatacctcgctctgctaatcctgttaccagtggctgctgccagtggcgataagtcgtgtcttaccgggttggactcaagacgatagttaccggataaggcgcagcggtcgggctgaacggggggttcgtgcacacagcccagcttggagcgaacgacctacaccgaactgagatacctacagcgtgagctatgagaaagcgccacgcttcccgaagggagaaaggcggacaggtatccggtaagcggcagggtcggaacaggagagcgcacgagggagcttccagggggaaacgcctggtatctttatagtcctgtcgggtttcgccacctctgacttgagcgtcgatttttgtgatgctcgtcaggggggcggagcctatggaaaaacgccagcaacgcggcctttttacggttcctggccttttgctggccttttgctcacatgt

SEQ ID NO: 130 - RNA, 7439 nt, synthetic construct
  source 1..7439: mol_type = other RNA
cctgcaggcagctgcgcgctcgctcgctcactgaggccgcccgggcaaagcccgggcgtcgggcgacctttggtcgcccggcctcagtgagcgagcgagcgcgcagagagggagtggccaactccatcactaggggttcctgcggccgcacgcgtggtaccgagggcctatttcccatgattccttcatatttgcatatacgatacaaggctgttagagagataattggaattaatttgactgtaaacacaaagatattagtacaaaatacgtgacgtagaaagtaataatttcttgggtagtttgcagttttaaaattatgttttaaaatggactatcatatgcttaccgtaacttgaaagtatttcgatttcttggctttatatatcttgtggaaaggacgaaacaccgtgcgaatacgcccacgcgatgttttagtactctggaaacagaatctactaaaacaaggcaaaatgccgtgtttatctcgtcaacttgttggcgagatttttgcgacgcgtggagttccgcgttacataacttacggtaaatggcccgcctggctgaccgcccaacgacccccgcccattgacgtcaataatgacgtatgttcccatagtaacgccaatagggactttccattgacgtcaatgggtggagtatttacggtaaactgcccacttggcagtacatcaagtgtatcatatgccaagtacgccccctattgacgtcaatgacggtaaatggcccgcctggcattatgcccagtacatgaccttatgggactttcctacttggcagtacatctacgtattagtcatcgctattaccatggtgatgcggttttggcagtacatcaatgggcgtggatagcggtttgactcacggggatttccaagtctccaccccattgacgtcaatgggagtttgttttggcaccaaaatcaacgggactttccaaaatgtcgtaacaactccgccccattgacgcaaatgggcggtaggcgtgtacggtgggaggtctatataagcagagctcgtttagtgaaccgtcagatcgcctggagacgccatccacgctgttttgacctccatagaagacaccggaattcggtaccaccggtgccaccatggccccaaagaagaagcggaaggtcggtatccacggagtcccagcagccaagcggaactacatcctgggcctggccatcggcatcaccagcgtgggctacggcatcatcgactacgagacacgggacgtgatcgatgccggcgtgcggctgttcaaagaggccaacgtggaaaacaacgagggcaggcggagcaagagaggcgccagaaggctgaagcggcggaggcggcatagaatccagagagtgaagaagctgctgttcgactacaacctgctgaccgaccacagcgagctgagcggcatcaacccctacgaggccagagtgaagggcctgagccagaagctgagcgaggaagagttctctgccgccctgctgcacctggccaagagaagaggcgtgcacaacgtgaacgaggtggaagaggacaccggcaacgagctgtccaccaaagagcagatcagccggaacagcaaggccctggaagagaaatacgtggccgaactgcagctggaacggctgaagaaagacggcgaagtgcggggcagcatcaacagattcaagaccagcgactacgtgaaagaagccaaacagctgctgaaggtgcagaaggcctaccaccagctggaccagagcttcatcgacacctacatcgacctgctggaaacccggcggacctactatgagggacctggcgagggcagccccttcggctggaaggacatcaaagaatggtacgagatgctgatgggccactgcacctacttccccgaggaactgcggagcgtgaagtacgcctacaacgccgacctgtacaacgccctgaacgacctgaacaatctcgtgatcaccagggacgagaacgagaagctggaatattacgagaagttccagatcatcgagaacgtgttcaagcagaagaagaagcccaccctgaagcagatcgccaaagaaatcctcgtgaacgaagaggatattaagggctacagagtgaccagcaccggcaagcccgagttcaccaacctgaaggtgtaccacgacatcaaggacattaccgcccggaaagagattattgagaacgccgagctgctggatcagattgccaagatcctgaccatctaccagagcagcgaggacatccaggaagaactgaccaatctgaactccgagctgacccaggaagagatcgagcagatctctaatctgaagggctataccggcacccacaacctgagcctgaaggccatcaacctgatcctggacgagctgtggcacaccaacgacaaccagatcgctatcttcaaccggctgaagctggtgcccaagaaggtggacctgtcccagcagaaagagatccccaccaccctggtggacgacttcatcctgagccccgtcgtgaagagaagcttcatccagagcatcaaagtgatcaacgccatcatcaagaagtacggcctgcccaacgacatcattatcgagctggcccgcgagaagaactccaaggacgcccagaaaatgatcaacgagatgcagaagcggaaccggcagaccaacgagcggatcgaggaaatcatccggaccaccggcaaagagaacgccaagtacctgatcgagaagatcaagctgcacgacatgcaggaaggcaagtgcctgtacagcctggaagccatccctctggaagatctgctgaacaaccccttcaactatgaggtggaccacatcatccccagaagcgtgtccttcgacaacagcttcaacaacaaggtgctcgtgaagcaggaagaagccagcaagaagggcaaccggaccccattccagtacctgagcagcagcgacagcaagatcagctacgaaaccttcaagaagcacatcctgaatctggccaagggcaagggcagaatcagcaagaccaagaaagagtatctgctggaagaacgggacatcaacaggttctccgtgcagaaagacttcatcaaccggaacctggtggataccagatacgccaccagaggcctgatgaacctgctgcggagctacttcagagtgaacaacctggacgtgaaagtgaagtccatcaatggcggcttcaccagctttctgcggcggaagtggaagtttaagaaagagcggaacaaggggtacaagcaccacgccgaggacgccctgatcattgccaacgccgatttcatcttcaaagagtggaagaaactggacaaggccaaaaaagtgatggaaaaccagatgttcgaggaaaagcaggccgagagcatgcccgagatcgaaaccgagcaggagtacaaagagatcttcatcaccccccaccagatcaagcacattaaggacttcaaggactacaagtacagccaccgggtggacaagaagcctaatagagagctgattaacgacaccctgtactccacccggaaggacgacaagggcaacaccctgatcgtgaacaatctgaacggcctgtacgacaaggacaatgacaagctgaaaaagctgatcaacaagagccccgaaaagctgctgatgtaccaccacgacccccagacctaccagaaactgaagctgattatggaacagtacggcgacgagaagaatcccctgtacaagtactacgaggaaaccgggaactacctgaccaagtactccaaaaaggacaacggccccgtgatcaagaagattaagtattacggcaacaaactgaacgcccatctggacatcaccgacgactaccccaacagcagaaacaaggtcgtgaagctgtccctgaagccctacagattcgacgtgtacctggacaatggcgtgtacaagttcgtgaccgtgaagaatctggatgtgatcaaaaaagaaaactactacgaagtgaatagcaagtgctatgaggaagctaagaagctgaagaagatcagcaaccaggccgagtttatcgcctccttctacaacaacgatctgatcaagatcaacggcgagctgtatagagtgatcggcgtgaacaacgacctgctgaaccggatcgaagtgaacatgatcgacatcacctaccgcgagtacctggaaaacatgaacgacaagaggccccccaggatcattaagacaatcgcctccaagacccagagcattaagaagtacagcacagacattctgggcaacctgtatgaagtgaaatctaagaagcaccctcagatcatcaaaaagggcaaaaggccggcggccacgaaaaaggccggccaggcaaaaaagaaaaagggatccgaggccagcggttccggacgggctgacgcattggacgattttgatctggatatgctgggaagtgacgccctcgatgattttgaccttgacatgcttggttcggatgcccttgatgactttgacctcgacatgctcggcagtgacgcccttgatgatttcgacctggacatgctgattaactcaagatgatctagacatatggatatctgactagtctcgagtttattgcagcttataatggttacaaataaagcaatagcatcacaaatttcacaaataaagcatttttttcactggaccgagcggccgcaggaacccctagtgatggagttggccactccctctctgcgcgctcgctcgctcactgaggccgggcgaccaaaggtcgcccgacgcccgggctttgcccgggcggcctcagtgagcgagcgagcgcgcagctgcctgcaggggcgcctgatgcggtattttctccttacgcatctgtgcggtatttcacaccgcatacgtcaaagcaaccatagtacgcgccctgtagcggcgcattaagcgcggcgggtgtggtggttacgcgcagcgtgaccgctacacttgccagcgccctagcgcccgctcctttcgctttcttcccttcctttctcgccacgttcgccggctttccccgtcaagctctaaatcgggggctccctttagggttccgatttagtgctttacggcacctcgaccccaaaaaacttgatttgggtgatggttcacgtagtgggccatcgccctgatagacggtttttcgccctttgacgttggagtccacgttctttaatagtggactcttgttccaaactggaacaacactcaaccctatctcgggctattcttttgatttataagggattttgccgatttcggcctattggttaaaaaatgagctgatttaacaaaaatttaacgcgaattttaacaaaatattaacgtttacaattttatggtgcactctcagtacaatctgctctgatgccgcatagttaagccagccccgacacccgccaacacccgctgacgcgccctgacgggcttgtctgctcccggcatccgcttacagacaagctgtgaccgtctccgggagctgcatgtgtcagaggttttcaccgtcatcaccgaaacgcgcgagacgaaagggcctcgtgatacgcctatttttataggttaatgtcatgataataatggtttcttagacgtcaggtggcacttttcggggaaatgtgcgcggaacccctatttgtttatttttctaaatacattcaaatatgtatccgctcatgagacaataaccctgataaatgcttcaataatattgaaaaaggaagagtatgagtattcaacatttccgtgtcgcccttattcccttttttgcggcattttgccttcctgtttttgctcacccagaaacgctggtgaaagtaaaagatgctgaagatcagttgggtgcacgagtgggttacatcgaactggatctcaacagcggtaagatccttgagagttttcgccccgaagaacgttttccaatgatgagcacttttaaagttctgctatgtggcgcggtattatcccgtattgacgccgggcaagagcaactcggtcgccgcatacactattctcagaatgacttggttgagtactcaccagtcacagaaaagcatcttacggatggcatgacagtaagagaattatgcagtgctgccataaccatgagtgataacactgcggccaacttacttctgacaacgatcggaggaccgaaggagctaaccgcttttttgcacaacatgggggatcatgtaactcgccttgatcgttgggaaccggagctgaatgaagccataccaaacgacgagcgtgacaccacgatgcctgtagcaatggcaacaacgttgcgcaaactattaactggcgaactacttactctagcttcccggcaacaattaatagactggatggaggcggataaagttgcaggaccacttctgcgctcggcccttccggctggctggtttattgctgataaatctggagccggtgagcgtgggtctcgcggtatcattgcagcactggggccagatggtaagccctcccgtatcgtagttatctacacgacggggagtcaggcaactatggatgaacgaaatagacagatcgctgagataggtgcctcactgattaagcattggtaactgtcagaccaagtttactcatatatactttagattgatttaaaacttcatttttaatttaaaaggatctaggtgaagatcctttttgataatctcatgaccaaaatcccttaacgtgagttttcgttccactgagcgtcagaccccgtagaaaagatcaaaggatcttcttgagatcctttttttctgcgcgtaatctgctgcttgcaaacaaaaaaaccaccgctaccagcggtggtttgtttgccggatcaagagctaccaactctttttccgaaggtaactggcttcagcagagcgcagataccaaatactgtccttctagtgtagccgtagttaggccaccacttcaagaactctgtagcaccgcctacatacctcgctctgctaatcctgttaccagtggctgctgccagtggcgataagtcgtgtcttaccgggttggactcaagacgatagttaccggataaggcgcagcggtcgggctgaacggggggttcgtgcacacagcccagcttggagcgaacgacctacaccgaactgagatacctacagcgtgagctatgagaaagcgccacgcttcccgaagggagaaaggcggacaggtatccggtaagcggcagggtcggaacaggagagcgcacgagggagcttccagggggaaacgcctggtatctttatagtcctgtcgggtttcgccacctctgacttgagcgtcgatttttgtgatgctcgtcaggggggcggagcctatggaaaaacgccagcaacgcggcctttttacggttcctggccttttgctggccttttgctcacatgt

SEQ ID NO: 131 - RNA, 7439 nt, synthetic construct
  source 1..7439: mol_type = other RNA
cctgcaggcagctgcgcgctcgctcgctcactgaggccgcccgggcaaagcccgggcgtcgggcgacctttggtcgcccggcctcagtgagcgagcgagcgcgcagagagggagtggccaactccatcactaggggttcctgcggccgcacgcgtggtaccgagggcctatttcccatgattccttcatatttgcatatacgatacaaggctgttagagagataattggaattaatttgactgtaaacacaaagatattagtacaaaatacgtgacgtagaaagtaataatttcttgggtagtttgcagttttaaaattatgttttaaaatggactatcatatgcttaccgtaacttgaaagtatttcgatttcttggctttatatatcttgtggaaaggacgaaacaccgccccagccggcccctttaatgttttagtactctggaaacagaatctactaaaacaaggcaaaatgccgtgtttatctcgtcaacttgttggcgagatttttgcgacgcgtggagttccgcgttacataacttacggtaaatggcccgcctggctgaccgcccaacgacccccgcccattgacgtcaataatgacgtatgttcccatagtaacgccaatagggactttccattgacgtcaatgggtggagtatttacggtaaactgcccacttggcagtacatcaagtgtatcatatgccaagtacgccccctattgacgtcaatgacggtaaatggcccgcctggcattatgcccagtacatgaccttatgggactttcctacttggcagtacatctacgtattagtcatcgctattaccatggtgatgcggttttggcagtacatcaatgggcgtggatagcggtttgactcacggggatttccaagtctccaccccattgacgtcaatgggagtttgttttggcaccaaaatcaacgggactttccaaaatgtcgtaacaactccgccccattgacgcaaatgggcggtaggcgtgtacggtgggaggtctatataagcagagctcgtttagtgaaccgtcagatcgcctggagacgccatccacgctgttttgacctccatagaagacaccggaattcggtaccaccggtgccaccatggccccaaagaagaagcggaaggtcggtatccacggagtcccagcagccaagcggaactacatcctgggcctggccatcggcatcaccagcgtgggctacggcatcatcgactacgagacacgggacgtgatcgatgccggcgtgcggctgttcaaagaggccaacgtggaaaacaacgagggcaggcggagcaagagaggcgccagaaggctgaagcggcggaggcggcatagaatccagagagtgaagaagctgctgttcgactacaacctgctgaccgaccacagcgagctgagcggcatcaacccctacgaggccagagtgaagggcctgagccagaagctgagcgaggaagagttctctgccgccctgctgcacctggccaagagaagaggcgtgcacaacgtgaacgaggtggaagaggacaccggcaacgagctgtccaccaaagagcagatcagccggaacagcaaggccctggaagagaaatacgtggccgaactgcagctggaacggctgaagaaagacggcgaagtgcggggcagcatcaacagattcaagaccagcgactacgtgaaagaagccaaacagctgctgaaggtgcagaaggcctaccaccagctggaccagagcttcatcgacacctacatcgacctgctggaaacccggcggacctactatgagggacctggcgagggcagccccttcggctggaaggacatcaaagaatggtacgagatgctgatgggccactgcacctacttccccgaggaactgcggagcgtgaagtacgcctacaacgccgacctgtacaacgccctgaacgacctgaacaatctcgtgatcaccagggacgagaacgagaagctggaatattacgagaagttccagatcatcgagaacgtgttcaagcagaagaagaagcccaccctgaagcagatcgccaaagaaatcctcgtgaacgaagaggatattaagggctacagagtgaccagcaccggcaagcccgagttcaccaacctgaaggtgtaccacgacatcaaggacattaccgcccggaaagagattattgagaacgccgagctgctggatcagattgccaagatcctgaccatctaccagagcagcgaggacatccaggaagaactgaccaatctgaactccgagctgacccaggaagagatcgagcagatctctaatctgaagggctataccggcacccacaacctgagcctgaaggccatcaacctgatcctggacgagctgtggcacaccaacgacaaccagatcgctatcttcaaccggctgaagctggtgcccaagaaggtggacctgtcccagcagaaagagatccccaccaccctggtggacgacttcatcctgagccccgtcgtgaagagaagcttcatccagagcatcaaagtgatcaacgccatcatcaagaagtacggcctgcccaacgacatcattatcgagctggcccgcgagaagaactccaaggacgcccagaaaatgatcaacgagatgcagaagcggaaccggcagaccaacgagcggatcgaggaaatcatccggaccaccggcaaagagaacgccaagtacctgatcgagaagatcaagctgcacgacatgcaggaaggcaagtgcctgtacagcctggaagccatccctctggaagatctgctgaacaaccccttcaactatgaggtggaccacatcatccccagaagcgtgtccttcgacaacagcttcaacaacaaggtgctcgtgaagcaggaagaagccagcaagaagggcaaccggaccccattccagtacctgagcagcagcgacagcaagatcagctacgaaaccttcaagaagcacatcctgaatctggccaagggcaagggcagaatcagcaagaccaagaaagagtatctgctggaagaacgggacatcaacaggttctccgtgcagaaagacttcatcaaccggaacctggtggataccagatacgccaccagaggcctgatgaacctgctgcggagctacttcagagtgaacaacctggacgtgaaagtgaagtccatcaatggcggcttcaccagctttctgcggcggaagtggaagtttaagaaagagcggaacaaggggtacaagcaccacgccgaggacgccctgatcattgccaacgccgatttcatcttcaaagagtggaagaaactggacaaggccaaaaaagtgatggaaaaccagatgttcgaggaaaagcaggccgagagcatgcccgagatcgaaaccgagcaggagtacaaagagatcttcatcaccccccaccagatcaagcacattaaggacttcaaggactacaagtacagccaccgggtggacaagaagcctaatagagagctgattaacgacaccctgtactccacccggaaggacgacaagggcaacaccctgatcgtgaacaatctgaacggcctgtacgacaaggacaatgacaagctgaaaaagctgatcaacaagagccccgaaaagctgctgatgtaccaccacgacccccagacctaccagaaactgaagctgattatggaacagtacggcgacgagaagaatcccctgtacaagtactacgaggaaaccgggaactacctgaccaagtactccaaaaaggacaacggccccgtgatcaagaagattaagtattacggcaacaaactgaacgcccatctggacatcaccgacgactaccccaacagcagaaacaaggtcgtgaagctgtccctgaagccctacagattcgacgtgtacctggacaatggcgtgtacaagttcgtgaccgtgaagaatctggatgtgatcaaaaaagaaaactactacgaagtgaatagcaagtgctatgaggaagctaagaagctgaagaagatcagcaaccaggccgagtttatcgcctccttctacaacaacgatctgatcaagatcaacggcgagctgtatagagtgatcggcgtgaacaacgacctgctgaaccggatcgaagtgaacatgatcgacatcacctaccgcgagtacctggaaaacatgaacgacaagaggccccccaggatcattaagacaatcgcctccaagacccagagcattaagaagtacagcacagacattctgggcaacctgtatgaagtgaaatctaagaagcaccctcagatcatcaaaaagggcaaaaggccggcggccacgaaaaaggccggccaggcaaaaaagaaaaagggatccgaggccagcggttccggacgggctgacgcattggacgattttgatctggatatgctgggaagtgacgccctcgatgattttgaccttgacatgcttggttcggatgcccttgatgactttgacctcgacatgctcggcagtgacgcccttgatgatttcgacctggacatgctgattaactcaagatgatctagacatatggatatctgactagtctcgagtttattgcagcttataatggttacaaataaagcaatagcatcacaaatttcacaaataaagcatttttttcactggaccgagcggccgcaggaacccctagtgatggagttggccactccctctctgcgcgctcgctcgctcactgaggccgggcgaccaaaggtcgcccgacgcccgggctttgcccgggcggcctcagtgagcgagcgagcgcgcagctgcctgcaggggcgcctgatgcggtattttctccttacgcatctgtgcggtatttcacaccgcatacgtcaaagcaaccatagtacgcgccctgtagcggcgcattaagcgcggcgggtgtggtggttacgcgcagcgtgaccgctacacttgccagcgccctagcgcccgctcctttcgctttcttcccttcctttctcgccacgttcgccggctttccccgtcaagctctaaatcgggggctccctttagggttccgatttagtgctttacggcacctcgaccccaaaaaacttgatttgggtgatggttcacgtagtgggccatcgccctgatagacggtttttcgccctttgacgttggagtccacgttctttaatagtggactcttgttccaaactggaacaacactcaaccctatctcgggctattcttttgatttataagggattttgccgatttcggcctattggttaaaaaatgagctgatttaacaaaaatttaacgcgaattttaacaaaatattaacgtttacaattttatggtgcactctcagtacaatctgctctgatgccgcatagttaagccagccccgacacccgccaacacccgctgacgcgccctgacgggcttgtctgctcccggcatccgcttacagacaagctgtgaccgtctccgggagctgcatgtgtcagaggttttcaccgtcatcaccgaaacgcgcgagacgaaagggcctcgtgatacgcctatttttataggttaatgtcatgataataatggtttcttagacgtcaggtggcacttttcggggaaatgtgcgcggaacccctatttgtttatttttctaaatacattcaaatatgtatccgctcatgagacaataaccctgataaatgcttcaataatattgaaaaaggaagagtatgagtattcaacatttccgtgtcgcccttattcccttttttgcggcattttgccttcctgtttttgctcacccagaaacgctggtgaaagtaaaagatgctgaagatcagttgggtgcacgagtgggttacatcgaactggatctcaacagcggtaagatccttgagagttttcgccccgaagaacgttttccaatgatgagcacttttaaagttctgctatgtggcgcggtattatcccgtattgacgccgggcaagagcaactcggtcgccgcatacactattctcagaatgacttggttgagtactcaccagtcacagaaaagcatcttacggatggcatgacagtaagagaattatgcagtgctgccataaccatgagtgataacactgcggccaacttacttctgacaacgatcggaggaccgaaggagctaaccgcttttttgcacaacatgggggatcatgtaactcgccttgatcgttgggaaccggagctgaatgaagccataccaaacgacgagcgtgacaccacgatgcctgtagcaatggcaacaacgttgcgcaaactattaactggcgaactacttactctagcttcccggcaacaattaatagactggatggaggcggataaagttgcaggaccacttctgcgctcggcccttccggctggctggtttattgctgataaatctggagccggtgagcgtgggtctcgcggtatcattgcagcactggggccagatggtaagccctcccgtatcgtagttatctacacgacggggagtcaggcaactatggatgaacgaaatagacagatcgctgagataggtgcctcactgattaagcattggtaactgtcagaccaagtttactcatatatactttagattgatttaaaacttcatttttaatttaaaaggatctaggtgaagatcctttttgataatctcatgaccaaaatcccttaacgtgagttttcgttccactgagcgtcagaccccgtagaaaagatcaaaggatcttcttgagatcctttttttctgcgcgtaatctgctgcttgcaaacaaaaaaaccaccgctaccagcggtggtttgtttgccggatcaagagctaccaactctttttccgaaggtaactggcttcagcagagcgcagataccaaatactgtccttctagtgtagccgtagttaggccaccacttcaagaactctgtagcaccgcctacatacctcgctctgctaatcctgttaccagtggctgctgccagtggcgataagtcgtgtcttaccgggttggactcaagacgatagttaccggataaggcgcagcggtcgggctgaacggggggttcgtgcacacagcccagcttggagcgaacgacctacaccgaactgagatacctacagcgtgagctatgagaaagcgccacgcttcccgaagggagaaaggcggacaggtatccggtaagcggcagggtcggaacaggagagcgcacgagggagcttccagggggaaacgcctggtatctttatagtcctgtcgggtttcgccacctctgacttgagcgtcgatttttgtgatgctcgtcaggggggcggagcctatggaaaaacgccagcaacgcggcctttttacggttcctggccttttgctggccttttgctcacatgt

SEQ ID NO: 132 - RNA, 7439 nt, synthetic construct
  source 1..7439: mol_type = other RNA
cctgcaggcagctgcgcgctcgctcgctcactgaggccgcccgggcaaagcccgggcgtcgggcgacctttggtcgcccggcctcagtgagcgagcgagcgcgcagagagggagtggccaactccatcactaggggttcctgcggccgcacgcgtggtaccgagggcctatttcccatgattccttcatatttgcatatacgatacaaggctgttagagagataattggaattaatttgactgtaaacacaaagatattagtacaaaatacgtgacgtagaaagtaataatttcttgggtagtttgcagttttaaaattatgttttaaaatggactatcatatgcttaccgtaacttgaaagtatttcgatttcttggctttatatatcttgtggaaaggacgaaacacctcctcctcctgatggcggttcgttttagtactctggaaacagaatctactaaaacaaggcaaaatgccgtgtttatctcgtcaacttgttggcgagatttttgcgacgcgtggagttccgcgttacataacttacggtaaatggcccgcctggctgaccgcccaacgacccccgcccattgacgtcaataatgacgtatgttcccatagtaacgccaatagggactttccattgacgtcaatgggtggagtatttacggtaaactgcccacttggcagtacatcaagtgtatcatatgccaagtacgccccctattgacgtcaatgacggtaaatggcccgcctggcattatgcccagtacatgaccttatgggactttcctacttggcagtacatctacgtattagtcatcgctattaccatggtgatgcggttttggcagtacatcaatgggcgtggatagcggtttgactcacggggatttccaagtctccaccccattgacgtcaatgggagtttgttttggcaccaaaatcaacgggactttccaaaatgtcgtaacaactccgccccattgacgcaaatgggcggtaggcgtgtacggtgggaggtctatataagcagagctcgtttagtgaaccgtcagatcgcctggagacgccatccacgctgttttgacctccatagaagacaccggaattcggtaccaccggtgccaccatggccccaaagaagaagcggaaggtcggtatccacggagtcccagcagccaagcggaactacatcctgggcctggccatcggcatcaccagcgtgggctacggcatcatcgactacgagacacgggacgtgatcgatgccggcgtgcggctgttcaaagaggccaacgtggaaaacaacgagggcaggcggagcaagagaggcgccagaaggctgaagcggcggaggcggcatagaatccagagagtgaagaagctgctgttcgactacaacctgctgaccgaccacagcgagctgagcggcatcaacccctacgaggccagagtgaagggcctgagccagaagctgagcgaggaagagttctctgccgccctgctgcacctggccaagagaagaggcgtgcacaacgtgaacgaggtggaagaggacaccggcaacgagctgtccaccaaagagcagatcagccggaacagcaaggccctggaagagaaatacgtggccgaactgcagctggaacggctgaagaaagacggcgaagtgcggggcagcatcaacagattcaagaccagcgactacgtgaaagaagccaaacagctgctgaaggtgcagaaggcctaccaccagctggaccagagcttcatcgacacctacatcgacctgctggaaacccggcggacctactatgagggacctggcgagggcagccccttcggctggaaggacatcaaagaatggtacgagatgctgatgggccactgcacctacttccccgaggaactgcggagcgtgaagtacgcctacaacgccgacctgtacaacgccctgaacgacctgaacaatctcgtgatcaccagggacgagaacgagaagctggaatattacgagaagttccagatcatcgagaacgtgttcaagcagaagaagaagcccaccctgaagcagatcgccaaagaaatcctcgtgaacgaagaggatattaagggctacagagtgaccagcaccggcaagcccgagttcaccaacctgaaggtgtaccacgacatcaaggacattaccgcccggaaagagattattgagaacgccgagctgctggatcagattgccaagatcctgaccatctaccagagcagcgaggacatccaggaagaactgaccaatctgaactccgagctgacccaggaagagatcgagcagatctctaatctgaagggctataccggcacccacaacctgagcctgaaggccatcaacctgatcctggacgagctgtggcacaccaacgacaaccagatcgctatcttcaaccggctgaagctggtgcccaagaaggtggacctgtcccagcagaaagagatccccaccaccctggtggacgacttcatcctgagccccgtcgtgaagagaagcttcatccagagcatcaaagtgatcaacgccatcatcaagaagtacggcctgcccaacgacatcattatcgagctggcccgcgagaagaactccaaggacgcccagaaaatgatcaacgagatgcagaagcggaaccggcagaccaacgagcggatcgaggaaatcatccggaccaccggcaaagagaacgccaagtacctgatcgagaagatcaagctgcacgacatgcaggaaggcaagtgcctgtacagcctggaagccatccctctggaagatctgctgaacaaccccttcaactatgaggtggaccacatcatccccagaagcgtgtccttcgacaacagcttcaacaacaaggtgctcgtgaagcaggaagaagccagcaagaagggcaaccggaccccattccagtacctgagcagcagcgacagcaagatcagctacgaaaccttcaagaagcacatcctgaatctggccaagggcaagggcagaatcagcaagaccaagaaagagtatctgctggaagaacgggacatcaacaggttctccgtgcagaaagacttcatcaaccggaacctggtggataccagatacgccaccagaggcctgatgaacctgctgcggagctacttcagagtgaacaacctggacgtgaaagtgaagtccatcaatggcggcttcaccagctttctgcggcggaagtggaagtttaagaaagagcggaacaaggggtacaagcaccacgccgaggacgccctgatcattgccaacgccgatttcatcttcaaagagtggaagaaactggacaaggccaaaaaagtgatggaaaaccagatgttcgaggaaaagcaggccgagagcatgcccgagatcgaaaccgagcaggagtacaaagagatcttcatcaccccccaccagatcaagcacattaaggacttcaaggactacaagtacagccaccgggtggacaagaagcctaatagagagctgattaacgacaccctgtactccacccggaaggacgacaagggcaacaccctgatcgtgaacaatctgaacggcctgtacgacaaggacaatgacaagctgaaaaagctgatcaacaagagccccgaaaagctgctgatgtaccaccacgacccccagacctaccagaaactgaagctgattatggaacagtacggcgacgagaagaatcccctgtacaagtactacgaggaaaccgggaactacctgaccaagtactccaaaaaggacaacggccccgtgatcaagaagattaagtattacggcaacaaactgaacgcccatctggacatcaccgacgactaccccaacagcagaaacaaggtcgtgaagctgtccctgaagccctacagattcgacgtgtacctggacaatggcgtgtacaagttcgtgaccgtgaagaatctggatgtgatcaaaaaagaaaactactacgaagtgaatagcaagtgctatgaggaagctaagaagctgaagaagatcagcaaccaggccgagtttatcgcctccttctacaacaacgatctgatcaagatcaacggcgagctgtatagagtgatcggcgtgaacaacgacctgctgaaccggatcgaagtgaacatgatcgacatcacctaccgcgagtacctggaaaacatgaacgacaagaggccccccaggatcattaagacaatcgcctccaagacccagagcattaagaagtacagcacagacattctgggcaacctgtatgaagtgaaatctaagaagcaccctcagatcatcaaaaagggcaaaaggccggcggccacgaaaaaggccggccaggcaaaaaagaaaaagggatccgaggccagcggttccggacgggctgacgcattggacgattttgatctggatatgctgggaagtgacgccctcgatgattttgaccttgacatgcttggttcggatgcccttgatgactttgacctcgacatgctcggcagtgacgcccttgatgatttcgacctggacatgctgattaactcaagatgatctagacatatggatatctgactagtctcgagtttattgcagcttataatggttacaaataaagcaatagcatcacaaatttcacaaataaagcatttttttcactggaccgagcggccgcaggaacccctagtgatggagttggccactccctctctgcgcgctcgctcgctcactgaggccgggcgaccaaaggtcgcccgacgcccgggctttgcccgggcggcctcagtgagcgagcgagcgcgcagctgcctgcaggggcgcctgatgcggtattttctccttacgcatctgtgcggtatttcacaccgcatacgtcaaagcaaccatagtacgcgccctgtagcggcgcattaagcgcggcgggtgtggtggttacgcgcagcgtgaccgctacacttgccagcgccctagcgcccgctcctttcgctttcttcccttcctttctcgccacgttcgccggctttccccgtcaagctctaaatcgggggctccctttagggttccgatttagtgctttacggcacctcgaccccaaaaaacttgatttgggtgatggttcacgtagtgggccatcgccctgatagacggtttttcgccctttgacgttggagtccacgttctttaatagtggactcttgttccaaactggaacaacactcaaccctatctcgggctattcttttgatttataagggattttgccgatttcggcctattggttaaaaaatgagctgatttaacaaaaatttaacgcgaattttaacaaaatattaacgtttacaattttatggtgcactctcagtacaatctgctctgatgccgcatagttaagccagccccgacacccgccaacacccgctgacgcgccctgacgggcttgtctgctcccggcatccgcttacagacaagctgtgaccgtctccgggagctgcatgtgtcagaggttttcaccgtcatcaccgaaacgcgcgagacgaaagggcctcgtgatacgcctatttttataggttaatgtcatgataataatggtttcttagacgtcaggtggcacttttcggggaaatgtgcgcggaacccctatttgtttatttttctaaatacattcaaatatgtatccgctcatgagacaataaccctgataaatgcttcaataatattgaaaaaggaagagtatgagtattcaacatttccgtgtcgcccttattcccttttttgcggcattttgccttcctgtttttgctcacccagaaacgctggtgaaagtaaaagatgctgaagatcagttgggtgcacgagtgggttacatcgaactggatctcaacagcggtaagatccttgagagttttcgccccgaagaacgttttccaatgatgagcacttttaaagttctgctatgtggcgcggtattatcccgtattgacgccgggcaagagcaactcggtcgccgcatacactattctcagaatgacttggttgagtactcaccagtcacagaaaagcatcttacggatggcatgacagtaagagaattatgcagtgctgccataaccatgagtgataacactgcggccaacttacttctgacaacgatcggaggaccgaaggagctaaccgcttttttgcacaacatgggggatcatgtaactcgccttgatcgttgggaaccggagctgaatgaagccataccaaacgacgagcgtgacaccacgatgcctgtagcaatggcaacaacgttgcgcaaactattaactggcgaactacttactctagcttcccggcaacaattaatagactggatggaggcggataaagttgcaggaccacttctgcgctcggcccttccggctggctggtttattgctgataaatctggagccggtgagcgtgggtctcgcggtatcattgcagcactggggccagatggtaagccctcccgtatcgtagttatctacacgacggggagtcaggcaactatggatgaacgaaatagacagatcgctgagataggtgcctcactgattaagcattggtaactgtcagaccaagtttactcatatatactttagattgatttaaaacttcatttttaatttaaaaggatctaggtgaagatcctttttgataatctcatgaccaaaatcccttaacgtgagttttcgttccactgagcgtcagaccccgtagaaaagatcaaaggatcttcttgagatcctttttttctgcgcgtaatctgctgcttgcaaacaaaaaaaccaccgctaccagcggtggtttgtttgccggatcaagagctaccaactctttttccgaaggtaactggcttcagcagagcgcagataccaaatactgtccttctagtgtagccgtagttaggccaccacttcaagaactctgtagcaccgcctacatacctcgctctgctaatcctgttaccagtggctgctgccagtggcgataagtcgtgtcttaccgggttggactcaagacgatagttaccggataaggcgcagcggtcgggctgaacggggggttcgtgcacacagcccagcttggagcgaacgacctacaccgaactgagatacctacagcgtgagctatgagaaagcgccacgcttcccgaagggagaaaggcggacaggtatccggtaagcggcagggtcggaacaggagagcgcacgagggagcttccagggggaaacgcctggtatctttatagtcctgtcgggtttcgccacctctgacttgagcgtcgatttttgtgatgctcgtcaggggggcggagcctatggaaaaacgccagcaacgcggcctttttacggttcctggccttttgctggccttttgctcacatgt

SEQ ID NO: 133 - RNA, 7439 nt, synthetic construct
  source 1..7439: mol_type = other RNA
cctgcaggcagctgcgcgctcgctcgctcactgaggccgcccgggcaaagcccgggcgtcgggcgacctttggtcgcccggcctcagtgagcgagcgagcgcgcagagagggagtggccaactccatcactaggggttcctgcggccgcacgcgtggtaccgagggcctatttcccatgattccttcatatttgcatatacgatacaaggctgttagagagataattggaattaatttgactgtaaacacaaagatattagtacaaaatacgtgacgtagaaagtaataatttcttgggtagtttgcagttttaaaattatgttttaaaatggactatcatatgcttaccgtaacttgaaagtatttcgatttcttggctttatatatcttgtggaaaggacgaaacaccgccccgggaaccgccatcagggttttagtactctggaaacagaatctactaaaacaaggcaaaatgccgtgtttatctcgtcaacttgttggcgagatttttgcgacgcgtggagttccgcgttacataacttacggtaaatggcccgcctggctgaccgcccaacgacccccgcccattgacgtcaataatgacgtatgttcccatagtaacgccaatagggactttccattgacgtcaatgggtggagtatttacggtaaactgcccacttggcagtacatcaagtgtatcatatgccaagtacgccccctattgacgtcaatgacggtaaatggcccgcctggcattatgcccagtacatgaccttatgggactttcctacttggcagtacatctacgtattagtcatcgctattaccatggtgatgcggttttggcagtacatcaatgggcgtggatagcggtttgactcacggggatttccaagtctccaccccattgacgtcaatgggagtttgttttggcaccaaaatcaacgggactttccaaaatgtcgtaacaactccgccccattgacgcaaatgggcggtaggcgtgtacggtgggaggtctatataagcagagctcgtttagtgaaccgtcagatcgcctggagacgccatccacgctgttttgacctccatagaagacaccggaattcggtaccaccggtgccaccatggccccaaagaagaagcggaaggtcggtatccacggagtcccagcagccaagcggaactacatcctgggcctggccatcggcatcaccagcgtgggctacggcatcatcgactacgagacacgggacgtgatcgatgccggcgtgcggctgttcaaagaggccaacgtggaaaacaacgagggcaggcggagcaagagaggcgccagaaggctgaagcggcggaggcggcatagaatccagagagtgaagaagctgctgttcgactacaacctgctgaccgaccacagcgagctgagcggcatcaacccctacgaggccagagtgaagggcctgagccagaagctgagcgaggaagagttctctgccgccctgctgcacctggccaagagaagaggcgtgcacaacgtgaacgaggtggaagaggacaccggcaacgagctgtccaccaaagagcagatcagccggaacagcaaggccctggaagagaaatacgtggccgaactgcagctggaacggctgaagaaagacggcgaagtgcggggcagcatcaacagattcaagaccagcgactacgtgaaagaagccaaacagctgctgaaggtgcagaaggcctaccaccagctggaccagagcttcatcgacacctacatcgacctgctggaaacccggcggacctactatgagggacctggcgagggcagccccttcggctggaaggacatcaaagaatggtacgagatgctgatgggccactgcacctacttccccgaggaactgcggagcgtgaagtacgcctacaacgccgacctgtacaacgccctgaacgacctgaacaatctcgtgatcaccagggacgagaacgagaagctggaatattacgagaagttccagatcatcgagaacgtgttcaagcagaagaagaagcccaccctgaagcagatcgccaaagaaatcctcgtgaacgaagaggatattaagggctacagagtgaccagcaccggcaagcccgagttcaccaacctgaaggtgtaccacgacatcaaggacattaccgcccggaaagagattattgagaacgccgagctgctggatcagattgccaagatcctgaccatctaccagagcagcgaggacatccaggaagaactgaccaatctgaactccgagctgacccaggaagagatcgagcagatctctaatctgaagggctataccggcacccacaacctgagcctgaaggccatcaacctgatcctggacgagctgtggcacaccaacgacaaccagatcgctatcttcaaccggctgaagctggtgcccaagaaggtggacctgtcccagcagaaagagatccccaccaccctggtggacgacttcatcctgagccccgtcgtgaagagaagcttcatccagagcatcaaagtgatcaacgccatcatcaagaagtacggcctgcccaacgacatcattatcgagctggcccgcgagaagaactccaaggacgcccagaaaatgatcaacgagatgcagaagcggaaccggcagaccaacgagcggatcgaggaaatcatccggaccaccggcaaagagaacgccaagtacctgatcgagaagatcaagctgcacgacatgcaggaaggcaagtgcctgtacagcctggaagccatccctctggaagatctgctgaacaaccccttcaactatgaggtggaccacatcatccccagaagcgtgtccttcgacaacagcttcaacaacaaggtgctcgtgaagcaggaagaagccagcaagaagggcaaccggaccccattccagtacctgagcagcagcgacagcaagatcagctacgaaaccttcaagaagcacatcctgaatctggccaagggcaagggcagaatcagcaagaccaagaaagagtatctgctggaagaacgggacatcaacaggttctccgtgcagaaagacttcatcaaccggaacctggtggataccagatacgccaccagaggcctgatgaacctgctgcggagctacttcagagtgaacaacctggacgtgaaagtgaagtccatcaatggcggcttcaccagctttctgcggcggaagtggaagtttaagaaagagcggaacaaggggtacaagcaccacgccgaggacgccctgatcattgccaacgccgatttcatcttcaaagagtggaagaaactggacaaggccaaaaaagtgatggaaaaccagatgttcgaggaaaagcaggccgagagcatgcccgagatcgaaaccgagcaggagtacaaagagatcttcatcaccccccaccagatcaagcacattaaggacttcaaggactacaagtacagccaccgggtggacaagaagcctaatagagagctgattaacgacaccctgtactccacccggaaggacgacaagggcaacaccctgatcgtgaacaatctgaacggcctgtacgacaaggacaatgacaagctgaaaaagctgatcaacaagagccccgaaaagctgctgatgtaccaccacgacccccagacctaccagaaactgaagctgattatggaacagtacggcgacgagaagaatcccctgtacaagtactacgaggaaaccgggaactacctgaccaagtactccaaaaaggacaacggccccgtgatcaagaagattaagtattacggcaacaaactgaacgcccatctggacatcaccgacgactaccccaacagcagaaacaaggtcgtgaagctgtccctgaagccctacagattcgacgtgtacctggacaatggcgtgtacaagttcgtgaccgtgaagaatctggatgtgatcaaaaaagaaaactactacgaagtgaatagcaagtgctatgaggaagctaagaagctgaagaagatcagcaaccaggccgagtttatcgcctccttctacaacaacgatctgatcaagatcaacggcgagctgtatagagtgatcggcgtgaacaacgacctgctgaaccggatcgaagtgaacatgatcgacatcacctaccgcgagtacctggaaaacatgaacgacaagaggccccccaggatcattaagacaatcgcctccaagacccagagcattaagaagtacagcacagacattctgggcaacctgtatgaagtgaaatctaagaagcaccctcagatcatcaaaaagggcaaaaggccggcggccacgaaaaaggccggccaggcaaaaaagaaaaagggatccgaggccagcggttccggacgggctgacgcattggacgattttgatctggatatgctgggaagtgacgccctcgatgattttgaccttgacatgcttggttcggatgcccttgatgactttgacctcgacatgctcggcagtgacgcccttgatgatttcgacctggacatgctgattaactcaagatgatctagacatatggatatctgactagtctcgagtttattgcagcttataatggttacaaataaagcaatagcatcacaaatttcacaaataaagcatttttttcactggaccgagcggccgcaggaacccctagtgatggagttggccactccctctctgcgcgctcgctcgctcactgaggccgggcgaccaaaggtcgcccgacgcccgggctttgcccgggcggcctcagtgagcgagcgagcgcgcagctgcctgcaggggcgcctgatgcggtattttctccttacgcatctgtgcggtatttcacaccgcatacgtcaaagcaaccatagtacgcgccctgtagcggcgcattaagcgcggcgggtgtggtggttacgcgcagcgtgaccgctacacttgccagcgccctagcgcccgctcctttcgctttcttcccttcctttctcgccacgttcgccggctttccccgtcaagctctaaatcgggggctccctttagggttccgatttagtgctttacggcacctcgaccccaaaaaacttgatttgggtgatggttcacgtagtgggccatcgccctgatagacggtttttcgccctttgacgttggagtccacgttctttaatagtggactcttgttccaaactggaacaacactcaaccctatctcgggctattcttttgatttataagggattttgccgatttcggcctattggttaaaaaatgagctgatttaacaaaaatttaacgcgaattttaacaaaatattaacgtttacaattttatggtgcactctcagtacaatctgctctgatgccgcatagttaagccagccccgacacccgccaacacccgctgacgcgccctgacgggcttgtctgctcccggcatccgcttacagacaagctgtgaccgtctccgggagctgcatgtgtcagaggttttcaccgtcatcaccgaaacgcgcgagacgaaagggcctcgtgatacgcctatttttataggttaatgtcatgataataatggtttcttagacgtcaggtggcacttttcggggaaatgtgcgcggaacccctatttgtttatttttctaaatacattcaaatatgtatccgctcatgagacaataaccctgataaatgcttcaataatattgaaaaaggaagagtatgagtattcaacatttccgtgtcgcccttattcccttttttgcggcattttgccttcctgtttttgctcacccagaaacgctggtgaaagtaaaagatgctgaagatcagttgggtgcacgagtgggttacatcgaactggatctcaacagcggtaagatccttgagagttttcgccccgaagaacgttttccaatgatgagcacttttaaagttctgctatgtggcgcggtattatcccgtattgacgccgggcaagagcaactcggtcgccgcatacactattctcagaatgacttggttgagtactcaccagtcacagaaaagcatcttacggatggcatgacagtaagagaattatgcagtgctgccataaccatgagtgataacactgcggccaacttacttctgacaacgatcggaggaccgaaggagctaaccgcttttttgcacaacatgggggatcatgtaactcgccttgatcgttgggaaccggagctgaatgaagccataccaaacgacgagcgtgacaccacgatgcctgtagcaatggcaacaacgttgcgcaaactattaactggcgaactacttactctagcttcccggcaacaattaatagactggatggaggcggataaagttgcaggaccacttctgcgctcggcccttccggctggctggtttattgctgataaatctggagccggtgagcgtgggtctcgcggtatcattgcagcactggggccagatggtaagccctcccgtatcgtagttatctacacgacggggagtcaggcaactatggatgaacgaaatagacagatcgctgagataggtgcctcactgattaagcattggtaactgtcagaccaagtttactcatatatactttagattgatttaaaacttcatttttaatttaaaaggatctaggtgaagatcctttttgataatctcatgaccaaaatcccttaacgtgagttttcgttccactgagcgtcagaccccgtagaaaagatcaaaggatcttcttgagatcctttttttctgcgcgtaatctgctgcttgcaaacaaaaaaaccaccgctaccagcggtggtttgtttgccggatcaagagctaccaactctttttccgaaggtaactggcttcagcagagcgcagataccaaatactgtccttctagtgtagccgtagttaggccaccacttcaagaactctgtagcaccgcctacatacctcgctctgctaatcctgttaccagtggctgctgccagtggcgataagtcgtgtcttaccgggttggactcaagacgatagttaccggataaggcgcagcggtcgggctgaacggggggttcgtgcacacagcccagcttggagcgaacgacctacaccgaactgagatacctacagcgtgagctatgagaaagcgccacgcttcccgaagggagaaaggcggacaggtatccggtaagcggcagggtcggaacaggagagcgcacgagggagcttccagggggaaacgcctggtatctttatagtcctgtcgggtttcgccacctctgacttgagcgtcgatttttgtgatgctcgtcaggggggcggagcctatggaaaaacgccagcaacgcggcctttttacggttcctggccttttgctggccttttgctcacatgt

SEQ ID NO: 134 - RNA, 7439 nt, synthetic construct
  source 1..7439: mol_type = other RNA
cctgcaggcagctgcgcgctcgctcgctcactgaggccgcccgggcaaagcccgggcgtcgggcgacctttggtcgcccggcctcagtgagcgagcgagcgcgcagagagggagtggccaactccatcactaggggttcctgcggccgcacgcgtggtaccgagggcctatttcccatgattccttcatatttgcatatacgatacaaggctgttagagagataattggaattaatttgactgtaaacacaaagatattagtacaaaatacgtgacgtagaaagtaataatttcttgggtagtttgcagttttaaaattatgttttaaaatggactatcatatgcttaccgtaacttgaaagtatttcgatttcttggctttatatatcttgtggaaaggacgaaacacctcctagcccggtaatccttgagttttagtactctggaaacagaatctactaaaacaaggcaaaatgccgtgtttatctcgtcaacttgttggcgagatttttgcgacgcgtggagttccgcgttacataacttacggtaaatggcccgcctggctgaccgcccaacgacccccgcccattgacgtcaataatgacgtatgttcccatagtaacgccaatagggactttccattgacgtcaatgggtggagtatttacggtaaactgcccacttggcagtacatcaagtgtatcatatgccaagtacgccccctattgacgtcaatgacggtaaatggcccgcctggcattatgcccagtacatgaccttatgggactttcctacttggcagtacatctacgtattagtcatcgctattaccatggtgatgcggttttggcagtacatcaatgggcgtggatagcggtttgactcacggggatttccaagtctccaccccattgacgtcaatgggagtttgttttggcaccaaaatcaacgggactttccaaaatgtcgtaacaactccgccccattgacgcaaatgggcggtaggcgtgtacggtgggaggtctatataagcagagctcgtttagtgaaccgtcagatcgcctggagacgccatccacgctgttttgacctccatagaagacaccggaattcggtaccaccggtgccaccatggccccaaagaagaagcggaaggtcggtatccacggagtcccagcagccaagcggaactacatcctgggcctggccatcggcatcaccagcgtgggctacggcatcatcgactacgagacacgggacgtgatcgatgccggcgtgcggctgttcaaagaggccaacgtggaaaacaacgagggcaggcggagcaagagaggcgccagaaggctgaagcggcggaggcggcatagaatccagagagtgaagaagctgctgttcgactacaacctgctgaccgaccacagcgagctgagcggcatcaacccctacgaggccagagtgaagggcctgagccagaagctgagcgaggaagagttctctgccgccctgctgcacctggccaagagaagaggcgtgcacaacgtgaacgaggtggaagaggacaccggcaacgagctgtccaccaaagagcagatcagccggaacagcaaggccctggaagagaaatacgtggccgaactgcagctggaacggctgaagaaagacggcgaagtgcggggcagcatcaacagattcaagaccagcgactacgtgaaagaagccaaacagctgctgaaggtgcagaaggcctaccaccagctggaccagagcttcatcgacacctacatcgacctgctggaaacccggcggacctactatgagggacctggcgagggcagccccttcggctggaaggacatcaaagaatggtacgagatgctgatgggccactgcacctacttccccgaggaactgcggagcgtgaagtacgcctacaacgccgacctgtacaacgccctgaacgacctgaacaatctcgtgatcaccagggacgagaacgagaagctggaatattacgagaagttccagatcatcgagaacgtgttcaagcagaagaagaagcccaccctgaagcagatcgccaaagaaatcctcgtgaacgaagaggatattaagggctacagagtgaccagcaccggcaagcccgagttcaccaacctgaaggtgtaccacgacatcaaggacattaccgcccggaaagagattattgagaacgccgagctgctggatcagattgccaagatcctgaccatctaccagagcagcgaggacatccaggaagaactgaccaatctgaactccgagctgacccaggaagagatcgagcagatctctaatctgaagggctataccggcacccacaacctgagcctgaaggccatcaacctgatcctggacgagctgtggcacaccaacgacaaccagatcgctatcttcaaccggctgaagctggtgcccaagaaggtggacctgtcccagcagaaagagatccccaccaccctggtggacgacttcatcctgagccccgtcgtgaagagaagcttcatccagagcatcaaagtgatcaacgccatcatcaagaagtacggcctgcccaacgacatcattatcgagctggcccgcgagaagaactccaaggacgcccagaaaatgatcaacgagatgcagaagcggaaccggcagaccaacgagcggatcgaggaaatcatccggaccaccggcaaagagaacgccaagtacctgatcgagaagatcaagctgcacgacatgcaggaaggcaagtgcctgtacagcctggaagccatccctctggaagatctgctgaacaaccccttcaactatgaggtggaccacatcatccccagaagcgtgtccttcgacaacagcttcaacaacaaggtgctcgtgaagcaggaagaagccagcaagaagggcaaccggaccccattccagtacctgagcagcagcgacagcaagatcagctacgaaaccttcaagaagcacatcctgaatctggccaagggcaagggcagaatcagcaagaccaagaaagagtatctgctggaagaacgggacatcaacaggttctccgtgcagaaagacttcatcaaccggaacctggtggataccagatacgccaccagaggcctgatgaacctgctgcggagctacttcagagtgaacaacctggacgtgaaagtgaagtccatcaatggcggcttcaccagctttctgcggcggaagtggaagtttaagaaagagcggaacaaggggtacaagcaccacgccgaggacgccctgatcattgccaacgccgatttcatcttcaaagagtggaagaaactggacaaggccaaaaaagtgatggaaaaccagatgttcgaggaaaagcaggccgagagcatgcccgagatcgaaaccgagcaggagtacaaagagatcttcatcaccccccaccagatcaagcacattaaggacttcaaggactacaagtacagccaccgggtggacaagaagcctaatagagagctgattaacgacaccctgtactccacccggaaggacgacaagggcaacaccctgatcgtgaacaatctgaacggcctgtacgacaaggacaatgacaagctgaaaaagctgatcaacaagagccccgaaaagctgctgatgtaccaccacgacccccagacctaccagaaactgaagctgattatggaacagtacggcgacgagaagaatcccctgtacaagtactacgaggaaaccgggaactacctgaccaagtactccaaaaaggacaacggccccgtgatcaagaagattaagtattacggcaacaaactgaacgcccatctggacatcaccgacgactaccccaacagcagaaacaaggtcgtgaagctgtccctgaagccctacagattcgacgtgtacctggacaatggcgtgtacaagttcgtgaccgtgaagaatctggatgtgatcaaaaaagaaaactactacgaagtgaatagcaagtgctatgaggaagctaagaagctgaagaagatcagcaaccaggccgagtttatcgcctccttctacaacaacgatctgatcaagatcaacggcgagctgtatagagtgatcggcgtgaacaacgacctgctgaaccggatcgaagtgaacatgatcgacatcacctaccgcgagtacctggaaaacatgaacgacaagaggccccccaggatcattaagacaatcgcctccaagacccagagcattaagaagtacagcacagacattctgggcaacctgtatgaagtgaaatctaagaagcaccctcagatcatcaaaaagggcaaaaggccggcggccacgaaaaaggccggccaggcaaaaaagaaaaagggatccgaggccagcggttccggacgggctgacgcattggacgattttgatctggatatgctgggaagtgacgccctcgatgattttgaccttgacatgcttggttcggatgcccttgatgactttgacctcgacatgctcggcagtgacgcccttgatgatttcgacctggacatgctgattaactcaagatgatctagacatatggatatctgactagtctcgagtttattgcagcttataatggttacaaataaagcaatagcatcacaaatttcacaaataaagcatttttttcactggaccgagcggccgcaggaacccctagtgatggagttggccactccctctctgcgcgctcgctcgctcactgaggccgggcgaccaaaggtcgcccgacgcccgggctttgcccgggcggcctcagtgagcgagcgagcgcgcagctgcctgcaggggcgcctgatgcggtattttctccttacgcatctgtgcggtatttcacaccgcatacgtcaaagcaaccatagtacgcgccctgtagcggcgcattaagcgcggcgggtgtggtggttacgcgcagcgtgaccgctacacttgccagcgccctagcgcccgctcctttcgctttcttcccttcctttctcgccacgttcgccggctttccccgtcaagctctaaatcgggggctccctttagggttccgatttagtgctttacggcacctcgaccccaaaaaacttgatttgggtgatggttcacgtagtgggccatcgccctgatagacggtttttcgccctttgacgttggagtccacgttctttaatagtggactcttgttccaaactggaacaacactcaaccctatctcgggctattcttttgatttataagggattttgccgatttcggcctattggttaaaaaatgagctgatttaacaaaaatttaacgcgaattttaacaaaatattaacgtttacaattttatggtgcactctcagtacaatctgctctgatgccgcatagttaagccagccccgacacccgccaacacccgctgacgcgccctgacgggcttgtctgctcccggcatccgcttacagacaagctgtgaccgtctccgggagctgcatgtgtcagaggttttcaccgtcatcaccgaaacgcgcgagacgaaagggcctcgtgatacgcctatttttataggttaatgtcatgataataatggtttcttagacgtcaggtggcacttttcggggaaatgtgcgcggaacccctatttgtttatttttctaaatacattcaaatatgtatccgctcatgagacaataaccctgataaatgcttcaataatattgaaaaaggaagagtatgagtattcaacatttccgtgtcgcccttattcccttttttgcggcattttgccttcctgtttttgctcacccagaaacgctggtgaaagtaaaagatgctgaagatcagttgggtgcacgagtgggttacatcgaactggatctcaacagcggtaagatccttgagagttttcgccccgaagaacgttttccaatgatgagcacttttaaagttctgctatgtggcgcggtattatcccgtattgacgccgggcaagagcaactcggtcgccgcatacactattctcagaatgacttggttgagtactcaccagtcacagaaaagcatcttacggatggcatgacagtaagagaattatgcagtgctgccataaccatgagtgataacactgcggccaacttacttctgacaacgatcggaggaccgaaggagctaaccgcttttttgcacaacatgggggatcatgtaactcgccttgatcgttgggaaccggagctgaatgaagccataccaaacgacgagcgtgacaccacgatgcctgtagcaatggcaacaacgttgcgcaaactattaactggcgaactacttactctagcttcccggcaacaattaatagactggatggaggcggataaagttgcaggaccacttctgcgctcggcccttccggctggctggtttattgctgataaatctggagccggtgagcgtgggtctcgcggtatcattgcagcactggggccagatggtaagccctcccgtatcgtagttatctacacgacggggagtcaggcaactatggatgaacgaaatagacagatcgctgagataggtgcctcactgattaagcattggtaactgtcagaccaagtttactcatatatactttagattgatttaaaacttcatttttaatttaaaaggatctaggtgaagatcctttttgataatctcatgaccaaaatcccttaacgtgagttttcgttccactgagcgtcagaccccgtagaaaagatcaaaggatcttcttgagatcctttttttctgcgcgtaatctgctgcttgcaaacaaaaaaaccaccgctaccagcggtggtttgtttgccggatcaagagctaccaactctttttccgaaggtaactggcttcagcagagcgcagataccaaatactgtccttctagtgtagccgtagttaggccaccacttcaagaactctgtagcaccgcctacatacctcgctctgctaatcctgttaccagtggctgctgccagtggcgataagtcgtgtcttaccgggttggactcaagacgatagttaccggataaggcgcagcggtcgggctgaacggggggttcgtgcacacagcccagcttggagcgaacgacctacaccgaactgagatacctacagcgtgagctatgagaaagcgccacgcttcccgaagggagaaaggcggacaggtatccggtaagcggcagggtcggaacaggagagcgcacgagggagcttccagggggaaacgcctggtatctttatagtcctgtcgggtttcgccacctctgacttgagcgtcgatttttgtgatgctcgtcaggggggcggagcctatggaaaaacgccagcaacgcggcctttttacggttcctggccttttgctggccttttgctcacatgt

SEQ ID NO: 135 - RNA, 7440 nt, synthetic construct
  source 1..7440: mol_type = other RNA
cctgcaggcagctgcgcgctcgctcgctcactgaggccgcccgggcaaagcccgggcgtcgggcgacctttggtcgcccggcctcagtgagcgagcgagcgcgcagagagggagtggccaactccatcactaggggttcctgcggccgcacgcgtggtaccgagggcctatttcccatgattccttcatatttgcatatacgatacaaggctgttagagagataattggaattaatttgactgtaaacacaaagatattagtacaaaatacgtgacgtagaaagtaataatttcttgggtagtttgcagttttaaaattatgttttaaaatggactatcatatgcttaccgtaacttgaaagtatttcgatttcttggctttatatatcttgtggaaaggacgaaacaccgctactgccgctgcagcggggcgttttagtactctggaaacagaatctactaaaacaaggcaaaatgccgtgtttatctcgtcaacttgttggcgagatttttgcgacgcgtggagttccgcgttacataacttacggtaaatggcccgcctggctgaccgcccaacgacccccgcccattgacgtcaataatgacgtatgttcccatagtaacgccaatagggactttccattgacgtcaatgggtggagtatttacggtaaactgcccacttggcagtacatcaagtgtatcatatgccaagtacgccccctattgacgtcaatgacggtaaatggcccgcctggcattatgcccagtacatgaccttatgggactttcctacttggcagtacatctacgtattagtcatcgctattaccatggtgatgcggttttggcagtacatcaatgggcgtggatagcggtttgactcacggggatttccaagtctccaccccattgacgtcaatgggagtttgttttggcaccaaaatcaacgggactttccaaaatgtcgtaacaactccgccccattgacgcaaatgggcggtaggcgtgtacggtgggaggtctatataagcagagctcgtttagtgaaccgtcagatcgcctggagacgccatccacgctgttttgacctccatagaagacaccggaattcggtaccaccggtgccaccatggccccaaagaagaagcggaaggtcggtatccacggagtcccagcagccaagcggaactacatcctgggcctggccatcggcatcaccagcgtgggctacggcatcatcgactacgagacacgggacgtgatcgatgccggcgtgcggctgttcaaagaggccaacgtggaaaacaacgagggcaggcggagcaagagaggcgccagaaggctgaagcggcggaggcggcatagaatccagagagtgaagaagctgctgttcgactacaacctgctgaccgaccacagcgagctgagcggcatcaacccctacgaggccagagtgaagggcctgagccagaagctgagcgaggaagagttctctgccgccctgctgcacctggccaagagaagaggcgtgcacaacgtgaacgaggtggaagaggacaccggcaacgagctgtccaccaaagagcagatcagccggaacagcaaggccctggaagagaaatacgtggccgaactgcagctggaacggctgaagaaagacggcgaagtgcggggcagcatcaacagattcaagaccagcgactacgtgaaagaagccaaacagctgctgaaggtgcagaaggcctaccaccagctggaccagagcttcatcgacacctacatcgacctgctggaaacccggcggacctactatgagggacctggcgagggcagccccttcggctggaaggacatcaaagaatggtacgagatgctgatgggccactgcacctacttccccgaggaactgcggagcgtgaagtacgcctacaacgccgacctgtacaacgccctgaacgacctgaacaatctcgtgatcaccagggacgagaacgagaagctggaatattacgagaagttccagatcatcgagaacgtgttcaagcagaagaagaagcccaccctgaagcagatcgccaaagaaatcctcgtgaacgaagaggatattaagggctacagagtgaccagcaccggcaagcccgagttcaccaacctgaaggtgtaccacgacatcaaggacattaccgcccggaaagagattattgagaacgccgagctgctggatcagattgccaagatcctgaccatctaccagagcagcgaggacatccaggaagaactgaccaatctgaactccgagctgacccaggaagagatcgagcagatctctaatctgaagggctataccggcacccacaacctgagcctgaaggccatcaacctgatcctggacgagctgtggcacaccaacgacaaccagatcgctatcttcaaccggctgaagctggtgcccaagaaggtggacctgtcccagcagaaagagatccccaccaccctggtggacgacttcatcctgagccccgtcgtgaagagaagcttcatccagagcatcaaagtgatcaacgccatcatcaagaagtacggcctgcccaacgacatcattatcgagctggcccgcgagaagaactccaaggacgcccagaaaatgatcaacgagatgcagaagcggaaccggcagaccaacgagcggatcgaggaaatcatccggaccaccggcaaagagaacgccaagtacctgatcgagaagatcaagctgcacgacatgcaggaaggcaagtgcctgtacagcctggaagccatccctctggaagatctgctgaacaaccccttcaactatgaggtggaccacatcatccccagaagcgtgtccttcgacaacagcttcaacaacaaggtgctcgtgaagcaggaagaagccagcaagaagggcaaccggaccccattccagtacctgagcagcagcgacagcaagatcagctacgaaaccttcaagaagcacatcctgaatctggccaagggcaagggcagaatcagcaagaccaagaaagagtatctgctggaagaacgggacatcaacaggttctccgtgcagaaagacttcatcaaccggaacctggtggataccagatacgccaccagaggcctgatgaacctgctgcggagctacttcagagtgaacaacctggacgtgaaagtgaagtccatcaatggcggcttcaccagctttctgcggcggaagtggaagtttaagaaagagcggaacaaggggtacaagcaccacgccgaggacgccctgatcattgccaacgccgatttcatcttcaaagagtggaagaaactggacaaggccaaaaaagtgatggaaaaccagatgttcgaggaaaagcaggccgagagcatgcccgagatcgaaaccgagcaggagtacaaagagatcttcatcaccccccaccagatcaagcacattaaggacttcaaggactacaagtacagccaccgggtggacaagaagcctaatagagagctgattaacgacaccctgtactccacccggaaggacgacaagggcaacaccctgatcgtgaacaatctgaacggcctgtacgacaaggacaatgacaagctgaaaaagctgatcaacaagagccccgaaaagctgctgatgtaccaccacgacccccagacctaccagaaactgaagctgattatggaacagtacggcgacgagaagaatcccctgtacaagtactacgaggaaaccgggaactacctgaccaagtactccaaaaaggacaacggccccgtgatcaagaagattaagtattacggcaacaaactgaacgcccatctggacatcaccgacgactaccccaacagcagaaacaaggtcgtgaagctgtccctgaagccctacagattcgacgtgtacctggacaatggcgtgtacaagttcgtgaccgtgaagaatctggatgtgatcaaaaaagaaaactactacgaagtgaatagcaagtgctatgaggaagctaagaagctgaagaagatcagcaaccaggccgagtttatcgcctccttctacaacaacgatctgatcaagatcaacggcgagctgtatagagtgatcggcgtgaacaacgacctgctgaaccggatcgaagtgaacatgatcgacatcacctaccgcgagtacctggaaaacatgaacgacaagaggccccccaggatcattaagacaatcgcctccaagacccagagcattaagaagtacagcacagacattctgggcaacctgtatgaagtgaaatctaagaagcaccctcagatcatcaaaaagggcaaaaggccggcggccacgaaaaaggccggccaggcaaaaaagaaaaagggatccgaggccagcggttccggacgggctgacgcattggacgattttgatctggatatgctgggaagtgacgccctcgatgattttgaccttgacatgcttggttcggatgcccttgatgactttgacctcgacatgctcggcagtgacgcccttgatgatttcgacctggacatgctgattaactcaagatgatctagacatatggatatctgactagtctcgagtttattgcagcttataatggttacaaataaagcaatagcatcacaaatttcacaaataaagcatttttttcactggaccgagcggccgcaggaacccctagtgatggagttggccactccctctctgcgcgctcgctcgctcactgaggccgggcgaccaaaggtcgcccgacgcccgggctttgcccgggcggcctcagtgagcgagcgagcgcgcagctgcctgcaggggcgcctgatgcggtattttctccttacgcatctgtgcggtatttcacaccgcatacgtcaaagcaaccatagtacgcgccctgtagcggcgcattaagcgcggcgggtgtggtggttacgcgcagcgtgaccgctacacttgccagcgccctagcgcccgctcctttcgctttcttcccttcctttctcgccacgttcgccggctttccccgtcaagctctaaatcgggggctccctttagggttccgatttagtgctttacggcacctcgaccccaaaaaacttgatttgggtgatggttcacgtagtgggccatcgccctgatagacggtttttcgccctttgacgttggagtccacgttctttaatagtggactcttgttccaaactggaacaacactcaaccctatctcgggctattcttttgatttataagggattttgccgatttcggcctattggttaaaaaatgagctgatttaacaaaaatttaacgcgaattttaacaaaatattaacgtttacaattttatggtgcactctcagtacaatctgctctgatgccgcatagttaagccagccccgacacccgccaacacccgctgacgcgccctgacgggcttgtctgctcccggcatccgcttacagacaagctgtgaccgtctccgggagctgcatgtgtcagaggttttcaccgtcatcaccgaaacgcgcgagacgaaagggcctcgtgatacgcctatttttataggttaatgtcatgataataatggtttcttagacgtcaggtggcacttttcggggaaatgtgcgcggaacccctatttgtttatttttctaaatacattcaaatatgtatccgctcatgagacaataaccctgataaatgcttcaataatattgaaaaaggaagagtatgagtattcaacatttccgtgtcgcccttattcccttttttgcggcattttgccttcctgtttttgctcacccagaaacgctggtgaaagtaaaagatgctgaagatcagttgggtgcacgagtgggttacatcgaactggatctcaacagcggtaagatccttgagagttttcgccccgaagaacgttttccaatgatgagcacttttaaagttctgctatgtggcgcggtattatcccgtattgacgccgggcaagagcaactcggtcgccgcatacactattctcagaatgacttggttgagtactcaccagtcacagaaaagcatcttacggatggcatgacagtaagagaattatgcagtgctgccataaccatgagtgataacactgcggccaacttacttctgacaacgatcggaggaccgaaggagctaaccgcttttttgcacaacatgggggatcatgtaactcgccttgatcgttgggaaccggagctgaatgaagccataccaaacgacgagcgtgacaccacgatgcctgtagcaatggcaacaacgttgcgcaaactattaactggcgaactacttactctagcttcccggcaacaattaatagactggatggaggcggataaagttgcaggaccacttctgcgctcggcccttccggctggctggtttattgctgataaatctggagccggtgagcgtgggtctcgcggtatcattgcagcactggggccagatggtaagccctcccgtatcgtagttatctacacgacggggagtcaggcaactatggatgaacgaaatagacagatcgctgagataggtgcctcactgattaagcattggtaactgtcagaccaagtttactcatatatactttagattgatttaaaacttcatttttaatttaaaaggatctaggtgaagatcctttttgataatctcatgaccaaaatcccttaacgtgagttttcgttccactgagcgtcagaccccgtagaaaagatcaaaggatcttcttgagatcctttttttctgcgcgtaatctgctgcttgcaaacaaaaaaaccaccgctaccagcggtggtttgtttgccggatcaagagctaccaactctttttccgaaggtaactggcttcagcagagcgcagataccaaatactgtccttctagtgtagccgtagttaggccaccacttcaagaactctgtagcaccgcctacatacctcgctctgctaatcctgttaccagtggctgctgccagtggcgataagtcgtgtcttaccgggttggactcaagacgatagttaccggataaggcgcagcggtcgggctgaacggggggttcgtgcacacagcccagcttggagcgaacgacctacaccgaactgagatacctacagcgtgagctatgagaaagcgccacgcttcccgaagggagaaaggcggacaggtatccggtaagcggcagggtcggaacaggagagcgcacgagggagcttccagggggaaacgcctggtatctttatagtcctgtcgggtttcgccacctctgacttgagcgtcgatttttgtgatgctcgtcaggggggcggagcctatggaaaaacgccagcaacgcggcctttttacggttcctggccttttgctggccttttgctcacatgt

SEQ ID NO: 136 - RNA, 7792 nt, synthetic construct
  source 1..7792: mol_type = other RNA
cctgcaggcagctgcgcgctcgctcgctcactgaggccgcccgggcaaagcccgggcgtcgggcgacctttggtcgcccggcctcagtgagcgagcgagcgcgcagagagggagtggccaactccatcactaggggttcctgcggccgcacgcgtgagggcctatttcccatgattccttcatatttgcatatacgatacaaggctgttagagagataattggaattaatttgactgtaaacacaaagatattagtacaaaatacgtgacgtagaaagtaataatttcttgggtagtttgcagttttaaaattatgttttaaaatggactatcatatgcttaccgtaacttgaaagtatttcgatttcttggctttatatatcttgtggaaaggacgaaacaccgccccagccggcccctttaatgttttagtactctggaaacagaatctactaaaacaaggcaaaatgccgtgtttatctcgtcaacttgttggcgagatttttgggcccaaaaaatctcgccaacaagttgacgagataaacacggcattttgccttgttttagtagattctgtttccagagtactaaaacgaaccgccatcaggaggaggaggtgtttcgtcctttccacaagatatataaagccaagaaatcgaaatactttcaagttacggtaagcatatgatagtccattttaaaacataattttaaaactgcaaactacccaagaaattattactttctacgtcacgtattttgtactaatatctttgtgtttacagtcaaattaattccaattatctctctaacagccttgtatcgtatatgcaaatatgaaggaatcatgggaaataggccctcctccacgcgtggagttccgcgttacataacttacggtaaatggcccgcctggctgaccgcccaacgacccccgcccattgacgtcaataatgacgtatgttcccatagtaacgccaatagggactttccattgacgtcaatgggtggagtatttacggtaaactgcccacttggcagtacatcaagtgtatcatatgccaagtacgccccctattgacgtcaatgacggtaaatggcccgcctggcattatgcccagtacatgaccttatgggactttcctacttggcagtacatctacgtattagtcatcgctattaccatggtgatgcggttttggcagtacatcaatgggcgtggatagcggtttgactcacggggatttccaagtctccaccccattgacgtcaatgggagtttgttttggcaccaaaatcaacgggactttccaaaatgtcgtaacaactccgccccattgacgcaaatgggcggtaggcgtgtacggtgggaggtctatataagcagagctcgtttagtgaaccgtcagatcgcctggagacgccatccacgctgttttgacctccatagaagacaccggaattcggtaccaccggtgccaccatggccccaaagaagaagcggaaggtcggtatccacggagtcccagcagccaagcggaactacatcctgggcctggccatcggcatcaccagcgtgggctacggcatcatcgactacgagacacgggacgtgatcgatgccggcgtgcggctgttcaaagaggccaacgtggaaaacaacgagggcaggcggagcaagagaggcgccagaaggctgaagcggcggaggcggcatagaatccagagagtgaagaagctgctgttcgactacaacctgctgaccgaccacagcgagctgagcggcatcaacccctacgaggccagagtgaagggcctgagccagaagctgagcgaggaagagttctctgccgccctgctgcacctggccaagagaagaggcgtgcacaacgtgaacgaggtggaagaggacaccggcaacgagctgtccaccaaagagcagatcagccggaacagcaaggccctggaagagaaatacgtggccgaactgcagctggaacggctgaagaaagacggcgaagtgcggggcagcatcaacagattcaagaccagcgactacgtgaaagaagccaaacagctgctgaaggtgcagaaggcctaccaccagctggaccagagcttcatcgacacctacatcgacctgctggaaacccggcggacctactatgagggacctggcgagggcagccccttcggctggaaggacatcaaagaatggtacgagatgctgatgggccactgcacctacttccccgaggaactgcggagcgtgaagtacgcctacaacgccgacctgtacaacgccctgaacgacctgaacaatctcgtgatcaccagggacgagaacgagaagctggaatattacgagaagttccagatcatcgagaacgtgttcaagcagaagaagaagcccaccctgaagcagatcgccaaagaaatcctcgtgaacgaagaggatattaagggctacagagtgaccagcaccggcaagcccgagttcaccaacctgaaggtgtaccacgacatcaaggacattaccgcccggaaagagattattgagaacgccgagctgctggatcagattgccaagatcctgaccatctaccagagcagcgaggacatccaggaagaactgaccaatctgaactccgagctgacccaggaagagatcgagcagatctctaatctgaagggctataccggcacccacaacctgagcctgaaggccatcaacctgatcctggacgagctgtggcacaccaacgacaaccagatcgctatcttcaaccggctgaagctggtgcccaagaaggtggacctgtcccagcagaaagagatccccaccaccctggtggacgacttcatcctgagccccgtcgtgaagagaagcttcatccagagcatcaaagtgatcaacgccatcatcaagaagtacggcctgcccaacgacatcattatcgagctggcccgcgagaagaactccaaggacgcccagaaaatgatcaacgagatgcagaagcggaaccggcagaccaacgagcggatcgaggaaatcatccggaccaccggcaaagagaacgccaagtacctgatcgagaagatcaagctgcacgacatgcaggaaggcaagtgcctgtacagcctggaagccatccctctggaagatctgctgaacaaccccttcaactatgaggtggaccacatcatccccagaagcgtgtccttcgacaacagcttcaacaacaaggtgctcgtgaagcaggaagaagccagcaagaagggcaaccggaccccattccagtacctgagcagcagcgacagcaagatcagctacgaaaccttcaagaagcacatcctgaatctggccaagggcaagggcagaatcagcaagaccaagaaagagtatctgctggaagaacgggacatcaacaggttctccgtgcagaaagacttcatcaaccggaacctggtggataccagatacgccaccagaggcctgatgaacctgctgcggagctacttcagagtgaacaacctggacgtgaaagtgaagtccatcaatggcggcttcaccagctttctgcggcggaagtggaagtttaagaaagagcggaacaaggggtacaagcaccacgccgaggacgccctgatcattgccaacgccgatttcatcttcaaagagtggaagaaactggacaaggccaaaaaagtgatggaaaaccagatgttcgaggaaaagcaggccgagagcatgcccgagatcgaaaccgagcaggagtacaaagagatcttcatcaccccccaccagatcaagcacattaaggacttcaaggactacaagtacagccaccgggtggacaagaagcctaatagagagctgattaacgacaccctgtactccacccggaaggacgacaagggcaacaccctgatcgtgaacaatctgaacggcctgtacgacaaggacaatgacaagctgaaaaagctgatcaacaagagccccgaaaagctgctgatgtaccaccacgacccccagacctaccagaaactgaagctgattatggaacagtacggcgacgagaagaatcccctgtacaagtactacgaggaaaccgggaactacctgaccaagtactccaaaaaggacaacggccccgtgatcaagaagattaagtattacggcaacaaactgaacgcccatctggacatcaccgacgactaccccaacagcagaaacaaggtcgtgaagctgtccctgaagccctacagattcgacgtgtacctggacaatggcgtgtacaagttcgtgaccgtgaagaatctggatgtgatcaaaaaagaaaactactacgaagtgaatagcaagtgctatgaggaagctaagaagctgaagaagatcagcaaccaggccgagtttatcgcctccttctacaacaacgatctgatcaagatcaacggcgagctgtatagagtgatcggcgtgaacaacgacctgctgaaccggatcgaagtgaacatgatcgacatcacctaccgcgagtacctggaaaacatgaacgacaagaggccccccaggatcattaagacaatcgcctccaagacccagagcattaagaagtacagcacagacattctgggcaacctgtatgaagtgaaatctaagaagcaccctcagatcatcaaaaagggcaaaaggccggcggccacgaaaaaggccggccaggcaaaaaagaaaaagggatccgaggccagcggttccggacgggctgacgcattggacgattttgatctggatatgctgggaagtgacgccctcgatgattttgaccttgacatgcttggttcggatgcccttgatgactttgacctcgacatgctcggcagtgacgcccttgatgatttcgacctggacatgctgattaactcaagatgatctagacatatggatatctgactagtctcgagtttattgcagcttataatggttacaaataaagcaatagcatcacaaatttcacaaataaagcatttttttcactggaccgagcggccgcaggaacccctagtgatggagttggccactccctctctgcgcgctcgctcgctcactgaggccgggcgaccaaaggtcgcccgacgcccgggctttgcccgggcggcctcagtgagcgagcgagcgcgcagctgcctgcaggggcgcctgatgcggtattttctccttacgcatctgtgcggtatttcacaccgcatacgtcaaagcaaccatagtacgcgccctgtagcggcgcattaagcgcggcgggtgtggtggttacgcgcagcgtgaccgctacacttgccagcgccctagcgcccgctcctttcgctttcttcccttcctttctcgccacgttcgccggctttccccgtcaagctctaaatcgggggctccctttagggttccgatttagtgctttacggcacctcgaccccaaaaaacttgatttgggtgatggttcacgtagtgggccatcgccctgatagacggtttttcgccctttgacgttggagtccacgttctttaatagtggactcttgttccaaactggaacaacactcaaccctatctcgggctattcttttgatttataagggattttgccgatttcggcctattggttaaaaaatgagctgatttaacaaaaatttaacgcgaattttaacaaaatattaacgtttacaattttatggtgcactctcagtacaatctgctctgatgccgcatagttaagccagccccgacacccgccaacacccgctgacgcgccctgacgggcttgtctgctcccggcatccgcttacagacaagctgtgaccgtctccgggagctgcatgtgtcagaggttttcaccgtcatcaccgaaacgcgcgagacgaaagggcctcgtgatacgcctatttttataggttaatgtcatgataataatggtttcttagacgtcaggtggcacttttcggggaaatgtgcgcggaacccctatttgtttatttttctaaatacattcaaatatgtatccgctcatgagacaataaccctgataaatgcttcaataatattgaaaaaggaagagtatgagtattcaacatttccgtgtcgcccttattcccttttttgcggcattttgccttcctgtttttgctcacccagaaacgctggtgaaagtaaaagatgctgaagatcagttgggtgcacgagtgggttacatcgaactggatctcaacagcggtaagatccttgagagttttcgccccgaagaacgttttccaatgatgagcacttttaaagttctgctatgtggcgcggtattatcccgtattgacgccgggcaagagcaactcggtcgccgcatacactattctcagaatgacttggttgagtactcaccagtcacagaaaagcatcttacggatggcatgacagtaagagaattatgcagtgctgccataaccatgagtgataacactgcggccaacttacttctgacaacgatcggaggaccgaaggagctaaccgcttttttgcacaacatgggggatcatgtaactcgccttgatcgttgggaaccggagctgaatgaagccataccaaacgacgagcgtgacaccacgatgcctgtagcaatggcaacaacgttgcgcaaactattaactggcgaactacttactctagcttcccggcaacaattaatagactggatggaggcggataaagttgcaggaccacttctgcgctcggcccttccggctggctggtttattgctgataaatctggagccggtgagcgtgggtctcgcggtatcattgcagcactggggccagatggtaagccctcccgtatcgtagttatctacacgacggggagtcaggcaactatggatgaacgaaatagacagatcgctgagataggtgcctcactgattaagcattggtaactgtcagaccaagtttactcatatatactttagattgatttaaaacttcatttttaatttaaaaggatctaggtgaagatcctttttgataatctcatgaccaaaatcccttaacgtgagttttcgttccactgagcgtcagaccccgtagaaaagatcaaaggatcttcttgagatcctttttttctgcgcgtaatctgctgcttgcaaacaaaaaaaccaccgctaccagcggtggtttgtttgccggatcaagagctaccaactctttttccgaaggtaactggcttcagcagagcgcagataccaaatactgtccttctagtgtagccgtagttaggccaccacttcaagaactctgtagcaccgcctacatacctcgctctgctaatcctgttaccagtggctgctgccagtggcgataagtcgtgtcttaccgggttggactcaagacgatagttaccggataaggcgcagcggtcgggctgaacggggggttcgtgcacacagcccagcttggagcgaacgacctacaccgaactgagatacctacagcgtgagctatgagaaagcgccacgcttcccgaagggagaaaggcggacaggtatccggtaagcggcagggtcggaacaggagagcgcacgagggagcttccagggggaaacgcctggtatctttatagtcctgtcgggtttcgccacctctgacttgagcgtcgatttttgtgatgctcgtcaggggggcggagcctatggaaaaacgccagcaacgcggcctttttacggttcctggccttttgctggccttttgctcacatgt

SEQ ID NO: 137 - RNA, 7792 nt, synthetic construct
  source 1..7792: mol_type = other RNA
cctgcaggcagctgcgcgctcgctcgctcactgaggccgcccgggcaaagcccgggcgtcgggcgacctttggtcgcccggcctcagtgagcgagcgagcgcgcagagagggagtggccaactccatcactaggggttcctgcggccgcacgcgtgagggcctatttcccatgattccttcatatttgcatatacgatacaaggctgttagagagataattggaattaatttgactgtaaacacaaagatattagtacaaaatacgtgacgtagaaagtaataatttcttgggtagtttgcagttttaaaattatgttttaaaatggactatcatatgcttaccgtaacttgaaagtatttcgatttcttggctttatatatcttgtggaaaggacgaaacaccgccccagccggcccctttaatgttttagtactctggaaacagaatctactaaaacaaggcaaaatgccgtgtttatctcgtcaacttgttggcgagatttttgggcccaaaaaatctcgccaacaagttgacgagataaacacggcattttgccttgttttagtagattctgtttccagagtactaaaaccctgatggcggttcccggggcggtgtttcgtcctttccacaagatatataaagccaagaaatcgaaatactttcaagttacggtaagcatatgatagtccattttaaaacataattttaaaactgcaaactacccaagaaattattactttctacgtcacgtattttgtactaatatctttgtgtttacagtcaaattaattccaattatctctctaacagccttgtatcgtatatgcaaatatgaaggaatcatgggaaataggccctcctccacgcgtggagttccgcgttacataacttacggtaaatggcccgcctggctgaccgcccaacgacccccgcccattgacgtcaataatgacgtatgttcccatagtaacgccaatagggactttccattgacgtcaatgggtggagtatttacggtaaactgcccacttggcagtacatcaagtgtatcatatgccaagtacgccccctattgacgtcaatgacggtaaatggcccgcctggcattatgcccagtacatgaccttatgggactttcctacttggcagtacatctacgtattagtcatcgctattaccatggtgatgcggttttggcagtacatcaatgggcgtggatagcggtttgactcacggggatttccaagtctccaccccattgacgtcaatgggagtttgttttggcaccaaaatcaacgggactttccaaaatgtcgtaacaactccgccccattgacgcaaatgggcggtaggcgtgtacggtgggaggtctatataagcagagctcgtttagtgaaccgtcagatcgcctggagacgccatccacgctgttttgacctccatagaagacaccggaattcggtaccaccggtgccaccatggccccaaagaagaagcggaaggtcggtatccacggagtcccagcagccaagcggaactacatcctgggcctggccatcggcatcaccagcgtgggctacggcatcatcgactacgagacacgggacgtgatcgatgccggcgtgcggctgttcaaagaggccaacgtggaaaacaacgagggcaggcggagcaagagaggcgccagaaggctgaagcggcggaggcggcatagaatccagagagtgaagaagctgctgttcgactacaacctgctgaccgaccacagcgagctgagcggcatcaacccctacgaggccagagtgaagggcctgagccagaagctgagcgaggaagagttctctgccgccctgctgcacctggccaagagaagaggcgtgcacaacgtgaacgaggtggaagaggacaccggcaacgagctgtccaccaaagagcagatcagccggaacagcaaggccctggaagagaaatacgtggccgaactgcagctggaacggctgaagaaagacggcgaagtgcggggcagcatcaacagattcaagaccagcgactacgtgaaagaagccaaacagctgctgaaggtgcagaaggcctaccaccagctggaccagagcttcatcgacacctacatcgacctgctggaaacccggcggacctactatgagggacctggcgagggcagccccttcggctggaaggacatcaaagaatggtacgagatgctgatgggccactgcacctacttccccgaggaactgcggagcgtgaagtacgcctacaacgccgacctgtacaacgccctgaacgacctgaacaatctcgtgatcaccagggacgagaacgagaagctggaatattacgagaagttccagatcatcgagaacgtgttcaagcagaagaagaagcccaccctgaagcagatcgccaaagaaatcctcgtgaacgaagaggatattaagggctacagagtgaccagcaccggcaagcccgagttcaccaacctgaaggtgtaccacgacatcaaggacattaccgcccggaaagagattattgagaacgccgagctgctggatcagattgccaagatcctgaccatctaccagagcagcgaggacatccaggaagaactgaccaatctgaactccgagctgacccaggaagagatcgagcagatctctaatctgaagggctataccggcacccacaacctgagcctgaaggccatcaacctgatcctggacgagctgtggcacaccaacgacaaccagatcgctatcttcaaccggctgaagctggtgcccaagaaggtggacctgtcccagcagaaagagatccccaccaccctggtggacgacttcatcctgagccccgtcgtgaagagaagcttcatccagagcatcaaagtgatcaacgccatcatcaagaagtacggcctgcccaacgacatcattatcgagctggcccgcgagaagaactccaaggacgcccagaaaatgatcaacgagatgcagaagcggaaccggcagaccaacgagcggatcgaggaaatcatccggaccaccggcaaagagaacgccaagtacctgatcgagaagatcaagctgcacgacatgcaggaaggcaagtgcctgtacagcctggaagccatccctctggaagatctgctgaacaaccccttcaactatgaggtggaccacatcatccccagaagcgtgtccttcgacaacagcttcaacaacaaggtgctcgtgaagcaggaagaagccagcaagaagggcaaccggaccccattccagtacctgagcagcagcgacagcaagatcagctacgaaaccttcaagaagcacatcctgaatctggccaagggcaagggcagaatcagcaagaccaagaaagagtatctgctggaagaacgggacatcaacaggttctccgtgcagaaagacttcatcaaccggaacctggtggataccagatacgccaccagaggcctgatgaacctgctgcggagctacttcagagtgaacaacctggacgtgaaagtgaagtccatcaatggcggcttcaccagctttctgcggcggaagtggaagtttaagaaagagcggaacaaggggtacaagcaccacgccgaggacgccctgatcattgccaacgccgatttcatcttcaaagagtggaagaaactggacaaggccaaaaaagtgatggaaaaccagatgttcgaggaaaagcaggccgagagcatgcccgagatcgaaaccgagcaggagtacaaagagatcttcatcaccccccaccagatcaagcacattaaggacttcaaggactacaagtacagccaccgggtggacaagaagcctaatagagagctgattaacgacaccctgtactccacccggaaggacgacaagggcaacaccctgatcgtgaacaatctgaacggcctgtacgacaaggacaatgacaagctgaaaaagctgatcaacaagagccccgaaaagctgctgatgtaccaccacgacccccagacctaccagaaactgaagctgattatggaacagtacggcgacgagaagaatcccctgtacaagtactacgaggaaaccgggaactacctgaccaagtactccaaaaaggacaacggccccgtgatcaagaagattaagtattacggcaacaaactgaacgcccatctggacatcaccgacgactaccccaacagcagaaacaaggtcgtgaagctgtccctgaagccctacagattcgacgtgtacctggacaatggcgtgtacaagttcgtgaccgtgaagaatctggatgtgatcaaaaaagaaaactactacgaagtgaatagcaagtgctatgaggaagctaagaagctgaagaagatcagcaaccaggccgagtttatcgcctccttctacaacaacgatctgatcaagatcaacggcgagctgtatagagtgatcggcgtgaacaacgacctgctgaaccggatcgaagtgaacatgatcgacatcacctaccgcgagtacctggaaaacatgaacgacaagaggccccccaggatcattaagacaatcgcctccaagacccagagcattaagaagtacagcacagacattctgggcaacctgtatgaagtgaaatctaagaagcaccctcagatcatcaaaaagggcaaaaggccggcggccacgaaaaaggccggccaggcaaaaaagaaaaagggatccgaggccagcggttccggacgggctgacgcattggacgattttgatctggatatgctgggaagtgacgccctcgatgattttgaccttgacatgcttggttcggatgcccttgatgactttgacctcgacatgctcggcagtgacgcccttgatgatttcgacctggacatgctgattaactcaagatgatctagacatatggatatctgactagtctcgagtttattgcagcttataatggttacaaataaagcaatagcatcacaaatttcacaaataaagcatttttttcactggaccgagcggccgcaggaacccctagtgatggagttggccactccctctctgcgcgctcgctcgctcactgaggccgggcgaccaaaggtcgcccgacgcccgggctttgcccgggcggcctcagtgagcgagcgagcgcgcagctgcctgcaggggcgcctgatgcggtattttctccttacgcatctgtgcggtatttcacaccgcatacgtcaaagcaaccatagtacgcgccctgtagcggcgcattaagcgcggcgggtgtggtggttacgcgcagcgtgaccgctacacttgccagcgccctagcgcccgctcctttcgctttcttcccttcctttctcgccacgttcgccggctttccccgtcaagctctaaatcgggggctccctttagggttccgatttagtgctttacggcacctcgaccccaaaaaacttgatttgggtgatggttcacgtagtgggccatcgccctgatagacggtttttcgccctttgacgttggagtccacgttctttaatagtggactcttgttccaaactggaacaacactcaaccctatctcgggctattcttttgatttataagggattttgccgatttcggcctattggttaaaaaatgagctgatttaacaaaaatttaacgcgaattttaacaaaatattaacgtttacaattttatggtgcactctcagtacaatctgctctgatgccgcatagttaagccagccccgacacccgccaacacccgctgacgcgccctgacgggcttgtctgctcccggcatccgcttacagacaagctgtgaccgtctccgggagctgcatgtgtcagaggttttcaccgtcatcaccgaaacgcgcgagacgaaagggcctcgtgatacgcctatttttataggttaatgtcatgataataatggtttcttagacgtcaggtggcacttttcggggaaatgtgcgcggaacccctatttgtttatttttctaaatacattcaaatatgtatccgctcatgagacaataaccctgataaatgcttcaataatattgaaaaaggaagagtatgagtattcaacatttccgtgtcgcccttattcccttttttgcggcattttgccttcctgtttttgctcacccagaaacgctggtgaaagtaaaagatgctgaagatcagttgggtgcacgagtgggttacatcgaactggatctcaacagcggtaagatccttgagagttttcgccccgaagaacgttttccaatgatgagcacttttaaagttctgctatgtggcgcggtattatcccgtattgacgccgggcaagagcaactcggtcgccgcatacactattctcagaatgacttggttgagtactcaccagtcacagaaaagcatcttacggatggcatgacagtaagagaattatgcagtgctgccataaccatgagtgataacactgcggccaacttacttctgacaacgatcggaggaccgaaggagctaaccgcttttttgcacaacatgggggatcatgtaactcgccttgatcgttgggaaccggagctgaatgaagccataccaaacgacgagcgtgacaccacgatgcctgtagcaatggcaacaacgttgcgcaaactattaactggcgaactacttactctagcttcccggcaacaattaatagactggatggaggcggataaagttgcaggaccacttctgcgctcggcccttccggctggctggtttattgctgataaatctggagccggtgagcgtgggtctcgcggtatcattgcagcactggggccagatggtaagccctcccgtatcgtagttatctacacgacggggagtcaggcaactatggatgaacgaaatagacagatcgctgagataggtgcctcactgattaagcattggtaactgtcagaccaagtttactcatatatactttagattgatttaaaacttcatttttaatttaaaaggatctaggtgaagatcctttttgataatctcatgaccaaaatcccttaacgtgagttttcgttccactgagcgtcagaccccgtagaaaagatcaaaggatcttcttgagatcctttttttctgcgcgtaatctgctgcttgcaaacaaaaaaaccaccgctaccagcggtggtttgtttgccggatcaagagctaccaactctttttccgaaggtaactggcttcagcagagcgcagataccaaatactgtccttctagtgtagccgtagttaggccaccacttcaagaactctgtagcaccgcctacatacctcgctctgctaatcctgttaccagtggctgctgccagtggcgataagtcgtgtcttaccgggttggactcaagacgatagttaccggataaggcgcagcggtcgggctgaacggggggttcgtgcacacagcccagcttggagcgaacgacctacaccgaactgagatacctacagcgtgagctatgagaaagcgccacgcttcccgaagggagaaaggcggacaggtatccggtaagcggcagggtcggaacaggagagcgcacgagggagcttccagggggaaacgcctggtatctttatagtcctgtcgggtttcgccacctctgacttgagcgtcgatttttgtgatgctcgtcaggggggcggagcctatggaaaaacgccagcaacgcggcctttttacggttcctggccttttgctggccttttgctcacatgt

SEQ ID NO: 138 - RNA, 7797 nt, synthetic construct
  source 1..7797: mol_type = other RNA
cctgcaggcagctgcgcgctcgctcgctcactgaggccgcccgggcaaagcccgggcgtcgggcgacctttggtcgcccggcctcagtgagcgagcgagcgcgcagagagggagtggccaactccatcactaggggttcctgcggccgcacgcgtggaggagggcctatttcccatgattccttcatatttgcatatacgatacaaggctgttagagagataattggaattaatttgactgtaaacacaaagatattagtacaaaatacgtgacgtagaaagtaataatttcttgggtagtttgcagttttaaaattatgttttaaaatggactatcatatgcttaccgtaacttgaaagtatttcgatttcttggctttatatatcttgtggaaaggacgaaacacctcctagcccggtaatccttgagttttagtactctggaaacagaatctactaaaacaaggcaaaatgccgtgtttatctcgtcaacttgttggcgagattttttgggcccgaggagggcctatttcccatgattccttcatatttgcatatacgatacaaggctgttagagagataattggaattaatttgactgtaaacacaaagatattagtacaaaatacgtgacgtagaaagtaataatttcttgggtagtttgcagttttaaaattatgttttaaaatggactatcatatgcttaccgtaacttgaaagtatttcgatttcttggctttatatatcttgtggaaaggacgaaacaccgctactgccgctgcagcggggcgttttagtactctggaaacagaatctactaaaacaaggcaaaatgccgtgtttatctcgtcaacttgttggcgagattttttacgcgtggagttccgcgttacataacttacggtaaatggcccgcctggctgaccgcccaacgacccccgcccattgacgtcaataatgacgtatgttcccatagtaacgccaatagggactttccattgacgtcaatgggtggagtatttacggtaaactgcccacttggcagtacatcaagtgtatcatatgccaagtacgccccctattgacgtcaatgacggtaaatggcccgcctggcattatgcccagtacatgaccttatgggactttcctacttggcagtacatctacgtattagtcatcgctattaccatggtgatgcggttttggcagtacatcaatgggcgtggatagcggtttgactcacggggatttccaagtctccaccccattgacgtcaatgggagtttgttttggcaccaaaatcaacgggactttccaaaatgtcgtaacaactccgccccattgacgcaaatgggcggtaggcgtgtacggtgggaggtctatataagcagagctcgtttagtgaaccgtcagatcgcctggagacgccatccacgctgttttgacctccatagaagacaccggaattcggtaccaccggtgccaccatggccccaaagaagaagcggaaggtcggtatccacggagtcccagcagccaagcggaactacatcctgggcctggccatcggcatcaccagcgtgggctacggcatcatcgactacgagacacgggacgtgatcgatgccggcgtgcggctgttcaaagaggccaacgtggaaaacaacgagggcaggcggagcaagagaggcgccagaaggctgaagcggcggaggcggcatagaatccagagagtgaagaagctgctgttcgactacaacctgctgaccgaccacagcgagctgagcggcatcaacccctacgaggccagagtgaagggcctgagccagaagctgagcgaggaagagttctctgccgccctgctgcacctggccaagagaagaggcgtgcacaacgtgaacgaggtggaagaggacaccggcaacgagctgtccaccaaagagcagatcagccggaacagcaaggccctggaagagaaatacgtggccgaactgcagctggaacggctgaagaaagacggcgaagtgcggggcagcatcaacagattcaagaccagcgactacgtgaaagaagccaaacagctgctgaaggtgcagaaggcctaccaccagctggaccagagcttcatcgacacctacatcgacctgctggaaacccggcggacctactatgagggacctggcgagggcagccccttcggctggaaggacatcaaagaatggtacgagatgctgatgggccactgcacctacttccccgaggaactgcggagcgtgaagtacgcctacaacgccgacctgtacaacgccctgaacgacctgaacaatctcgtgatcaccagggacgagaacgagaagctggaatattacgagaagttccagatcatcgagaacgtgttcaagcagaagaagaagcccaccctgaagcagatcgccaaagaaatcctcgtgaacgaagaggatattaagggctacagagtgaccagcaccggcaagcccgagttcaccaacctgaaggtgtaccacgacatcaaggacattaccgcccggaaagagattattgagaacgccgagctgctggatcagattgccaagatcctgaccatctaccagagcagcgaggacatccaggaagaactgaccaatctgaactccgagctgacccaggaagagatcgagcagatctctaatctgaagggctataccggcacccacaacctgagcctgaaggccatcaacctgatcctggacgagctgtggcacaccaacgacaaccagatcgctatcttcaaccggctgaagctggtgcccaagaaggtggacctgtcccagcagaaagagatccccaccaccctggtggacgacttcatcctgagccccgtcgtgaagagaagcttcatccagagcatcaaagtgatcaacgccatcatcaagaagtacggcctgcccaacgacatcattatcgagctggcccgcgagaagaactccaaggacgcccagaaaatgatcaacgagatgcagaagcggaaccggcagaccaacgagcggatcgaggaaatcatccggaccaccggcaaagagaacgccaagtacctgatcgagaagatcaagctgcacgacatgcaggaaggcaagtgcctgtacagcctggaagccatccctctggaagatctgctgaacaaccccttcaactatgaggtggaccacatcatccccagaagcgtgtccttcgacaacagcttcaacaacaaggtgctcgtgaagcaggaagaagccagcaagaagggcaaccggaccccattccagtacctgagcagcagcgacagcaagatcagctacgaaaccttcaagaagcacatcctgaatctggccaagggcaagggcagaatcagcaagaccaagaaagagtatctgctggaagaacgggacatcaacaggttctccgtgcagaaagacttcatcaaccggaacctggtggataccagatacgccaccagaggcctgatgaacctgctgcggagctacttcagagtgaacaacctggacgtgaaagtgaagtccatcaatggcggcttcaccagctttctgcggcggaagtggaagtttaagaaagagcggaacaaggggtacaagcaccacgccgaggacgccctgatcattgccaacgccgatttcatcttcaaagagtggaagaaactggacaaggccaaaaaagtgatggaaaaccagatgttcgaggaaaagcaggccgagagcatgcccgagatcgaaaccgagcaggagtacaaagagatcttcatcaccccccaccagatcaagcacattaaggacttcaaggactacaagtacagccaccgggtggacaagaagcctaatagagagctgattaacgacaccctgtactccacccggaaggacgacaagggcaacaccctgatcgtgaacaatctgaacggcctgtacgacaaggacaatgacaagctgaaaaagctgatcaacaagagccccgaaaagctgctgatgtaccaccacgacccccagacctaccagaaactgaagctgattatggaacagtacggcgacgagaagaatcccctgtacaagtactacgaggaaaccgggaactacctgaccaagtactccaaaaaggacaacggccccgtgatcaagaagattaagtattacggcaacaaactgaacgcccatctggacatcaccgacgactaccccaacagcagaaacaaggtcgtgaagctgtccctgaagccctacagattcgacgtgtacctggacaatggcgtgtacaagttcgtgaccgtgaagaatctggatgtgatcaaaaaagaaaactactacgaagtgaatagcaagtgctatgaggaagctaagaagctgaagaagatcagcaaccaggccgagtttatcgcctccttctacaacaacgatctgatcaagatcaacggcgagctgtatagagtgatcggcgtgaacaacgacctgctgaaccggatcgaagtgaacatgatcgacatcacctaccgcgagtacctggaaaacatgaacgacaagaggccccccaggatcattaagacaatcgcctccaagacccagagcattaagaagtacagcacagacattctgggcaacctgtatgaagtgaaatctaagaagcaccctcagatcatcaaaaagggcaaaaggccggcggccacgaaaaaggccggccaggcaaaaaagaaaaagggatccgaggccagcggttccggacgggctgacgcattggacgattttgatctggatatgctgggaagtgacgccctcgatgattttgaccttgacatgcttggttcggatgcccttgatgactttgacctcgacatgctcggcagtgacgcccttgatgatttcgacctggacatgctgattaactcaagatgatctagacatatggatatctgactagtctcgagtttattgcagcttataatggttacaaataaagcaatagcatcacaaatttcacaaataaagcatttttttcactggaccgagcggccgcaggaacccctagtgatggagttggccactccctctctgcgcgctcgctcgctcactgaggccgggcgaccaaaggtcgcccgacgcccgggctttgcccgggcggcctcagtgagcgagcgagcgcgcagctgcctgcaggggcgcctgatgcggtattttctccttacgcatctgtgcggtatttcacaccgcatacgtcaaagcaaccatagtacgcgccctgtagcggcgcattaagcgcggcgggtgtggtggttacgcgcagcgtgaccgctacacttgccagcgccctagcgcccgctcctttcgctttcttcccttcctttctcgccacgttcgccggctttccccgtcaagctctaaatcgggggctccctttagggttccgatttagtgctttacggcacctcgaccccaaaaaacttgatttgggtgatggttcacgtagtgggccatcgccctgatagacggtttttcgccctttgacgttggagtccacgttctttaatagtggactcttgttccaaactggaacaacactcaaccctatctcgggctattcttttgatttataagggattttgccgatttcggcctattggttaaaaaatgagctgatttaacaaaaatttaacgcgaattttaacaaaatattaacgtttacaattttatggtgcactctcagtacaatctgctctgatgccgcatagttaagccagccccgacacccgccaacacccgctgacgcgccctgacgggcttgtctgctcccggcatccgcttacagacaagctgtgaccgtctccgggagctgcatgtgtcagaggttttcaccgtcatcaccgaaacgcgcgagacgaaagggcctcgtgatacgcctatttttataggttaatgtcatgataataatggtttcttagacgtcaggtggcacttttcggggaaatgtgcgcggaacccctatttgtttatttttctaaatacattcaaatatgtatccgctcatgagacaataaccctgataaatgcttcaataatattgaaaaaggaagagtatgagtattcaacatttccgtgtcgcccttattcccttttttgcggcattttgccttcctgtttttgctcacccagaaacgctggtgaaagtaaaagatgctgaagatcagttgggtgcacgagtgggttacatcgaactggatctcaacagcggtaagatccttgagagttttcgccccgaagaacgttttccaatgatgagcacttttaaagttctgctatgtggcgcggtattatcccgtattgacgccgggcaagagcaactcggtcgccgcatacactattctcagaatgacttggttgagtactcaccagtcacagaaaagcatcttacggatggcatgacagtaagagaattatgcagtgctgccataaccatgagtgataacactgcggccaacttacttctgacaacgatcggaggaccgaaggagctaaccgcttttttgcacaacatgggggatcatgtaactcgccttgatcgttgggaaccggagctgaatgaagccataccaaacgacgagcgtgacaccacgatgcctgtagcaatggcaacaacgttgcgcaaactattaactggcgaactacttactctagcttcccggcaacaattaatagactggatggaggcggataaagttgcaggaccacttctgcgctcggcccttccggctggctggtttattgctgataaatctggagccggtgagcgtgggtctcgcggtatcattgcagcactggggccagatggtaagccctcccgtatcgtagttatctacacgacggggagtcaggcaactatggatgaacgaaatagacagatcgctgagataggtgcctcactgattaagcattggtaactgtcagaccaagtttactcatatatactttagattgatttaaaacttcatttttaatttaaaaggatctaggtgaagatcctttttgataatctcatgaccaaaatcccttaacgtgagttttcgttccactgagcgtcagaccccgtagaaaagatcaaaggatcttcttgagatcctttttttctgcgcgtaatctgctgcttgcaaacaaaaaaaccaccgctaccagcggtggtttgtttgccggatcaagagctaccaactctttttccgaaggtaactggcttcagcagagcgcagataccaaatactgtccttctagtgtagccgtagttaggccaccacttcaagaactctgtagcaccgcctacatacctcgctctgctaatcctgttaccagtggctgctgccagtggcgataagtcgtgtcttaccgggttggactcaagacgatagttaccggataaggcgcagcggtcgggctgaacggggggttcgtgcacacagcccagcttggagcgaacgacctacaccgaactgagatacctacagcgtgagctatgagaaagcgccacgcttcccgaagggagaaaggcggacaggtatccggtaagcggcagggtcggaacaggagagcgcacgagggagcttccagggggaaacgcctggtatctttatagtcctgtcgggtttcgccacctctgacttgagcgtcgatttttgtgatgctcgtcaggggggcggagcctatggaaaaacgccagcaacgcggcctttttacggttcctggccttttgctggccttttgctcacatgt
